(19) United States
(12) Patent Application Publication
(10) Pub. No.: US 2008/0287383 A1
(43) Pub. Date: Nov. 20, 2008

(54) NUCLEIC ACID COMPOUNDS FOR INHIBITING ERBB GENE EXPRESSION AND USES THEREOF

(75) Inventors: Steven C. Quay, Woodinville, WA (US); James McSwiggen, Bothell, WA (US); Narendra K. Vaish, Kirkland, WA (US); Mohammad Ahmadian, Bothell, WA (US)

Correspondence Address: NASTECH PHARMACEUTICAL COMPANY INC;MDRNA, Inc., 3830 MONTE VILLA PARKWAY, BOTHELL, WA, 98021-7266, US

(73) Assignee: NASTECH PHARMACEUTICAL COMPANY INC., Bothell, WA (US)

(21) Appl. No.: 12/039,658

(22) Filed: Feb. 28, 2008

Related U.S. Application Data
(60) Provisional application No. 60/934,940, filed on Mar. 2, 2007.
(60) Provisional application No. 60/934,930, filed on Mar. 16, 2007.
(60) Provisional application No. 60/934,946, filed on May 3, 2007.
(60) Provisional application No. 60/934,945, filed on May 10, 2007.
(60) Provisional application No. 60/934,935, filed on May 15, 2007.
(60) Provisional application No. 60/934,922, filed on May 17, 2007.

(51) Int. Cl. A61K 31/7105; C07H 21/02; A61P 35/00

(52) U.S. Cl. 514/44; 536/23.1

(57) ABSTRACT

The present disclosure provides meroduplex ribonucleic acid molecules (mdRNA) capable of decreasing or silencing ERBB gene expression. An mdRNA of this disclosure comprises at least three strands that combine to form at least two non-overlapping double-stranded regions separated by a nick or gap wherein one strand is complementary to an ERBB mRNA. In addition, the meroduplex may have at least one uridine substituted with a 5-methyluridine, a nucleoside replaced with a locked nucleic acid, or optionally other modifications, and any combination thereof. Also provided are methods of decreasing expression of an ERBB gene in a cell or in a subject to treat an ERBB-related disease.

### CROSS-REFERENCE TO RELATED APPLICATIONS

[0001] The present application claims priority to U.S. Patent Application Nos. 60/934,940, filed Mar. 2, 2007; 60/934,930, filed Mar. 16, 2007; 60/934,945, filed May 10, 2007; 60/934,946, filed May 3, 2007; 60/934,935, filed May 15, 2007; and 60/934,922, filed May 17, 2007, each of which is incorporated by reference in its entirety.

### TECHNICAL FIELD

[0002] The present disclosure relates generally to compounds for use in treating hyperproliferative or inflammatory disorders by gene silencing and, more specifically, to a nicked or gapped double-stranded RNA (dsRNA) comprising at least three strands that decreases expression of an ERBB gene, and to uses of such dsRNA to treat or prevent hyperproliferative or inflammatory diseases associated with inappropriate expression of an ERBB gene. The dsRNA that decreases an ERBB gene expression may optionally have at least one uridine substituted with a 5-methyluridine.

### BACKGROUND

[0003] RNA interference (RNAi) refers to the cellular process of sequence specific, post-transcriptional gene silencing in animals mediated by small inhibitory nucleic acid molecules, such as a double-stranded RNA (dsRNA) that is homologous to a portion of a targeted messenger RNA (Fire et al., Nature 391:806, 1998; Hamilton et al., Science 286:950-951, 1999). RNAi has been observed in a variety of organisms, including mammalians (Fire et al., Nature 391:806, 1998; Bahramian and Zarbl, Mol. Cell. Biol. 19:274-283, 1999; Wianny and Goetz, Nature Cell Biol. 2:70, 1999). RNAi can be induced by introducing an exogenous synthetic 21-nucleotide RNA duplex into cultured mammalian cells (Elbashir et al., Nature 411:494, 2001a).

[0004] The mechanism by which dsRNA mediates targeted gene-silencing can be described as involving two steps. The first step involves degradation of long dsRNAs by a ribonuclease III-like enzyme, referred to as Dicer, into short interfering RNAs (siRNAs) having from 21 to 23 nucleotides with double-stranded regions of about 19 base pairs and a two nucleotide, generally, overhang at each 3′-end (Berstein et al., Nature 409:363, 2001; Elbashir et al., Genes Dev. 15:188, 2001b; and Kim et al., Nature Biotech. 23:222, 2005). The second step of RNAi gene-silencing involves activation of a multi-component nuclease having one strand (guide or antisense strand) from the siRNA and an Argonaute protein to form an RNA-induced silencing complex (“RISC”) (Elbashir et al., Genes Dev. 15:188, 2001). Argonaute initially associates with a double-stranded siRNA and then endonucleolytically cleaves the non-incorporated strand (passenger or sense strand) to facilitate its release due to resulting thermodynamic instability of the cleaved duplex (Leuschner et al., EMBO 7:314, 2006). The guide strand in the activated RISC binds to a complementary target mRNA and cleaves the mRNA to promote gene silencing. Cleavage of the target RNA occurs in the middle of the target region that is complementary to the guide strand (Elbashir et al., 2001b).

[0005] The ErbB/HER gene family (erythroblastic leukemia viral (v-erb-b) oncogene homolog family, also know as human epidermal growth factor receptor or HER) encode cell surface localized receptor tyrosine kinases. There are four members of the ERbB family of receptor tyrosine kinases—epidermal growth factor receptor (EGFR), ERBB2 (HER2/neu), ERBB3, and ERBB4. The ERbB family constitutes a signal transduction pathway known to regulate cell survival, proliferation, development and differentiation in mammalians (Riese and Stern, Bioessays 20:41, 1998; Oda et al., Mol. Syst. Biol. 10:1, 2005; Holbro et al., Exp. Cell Res. 284:99, 2003). This mechanism and the downstream effectors are linked with cell proliferation, angiogenesis, migration, and invasion (Holbro et al., 2003; Nair, Current Science 88:890, 2005; Monilola et al., EMBO 19:3159, 2000).

[0006] The ligand dependent and/or independent dysregulation of one or more of the ERBB family of tyrosine kinase receptors, either through their overexpression and/or mutation, have been implicated in the development of a variety of cancers. As such, the ERbB family is a major cause of morbidity and mortality throughout the world. For example, EGFR is overexpressed in 40% of gliomas, and overexpression of EGFR correlates to higher grade and reduced survival (Hsieh et al., Lung Cancer 29:151, 2000). Overexpression of ERBB2/HER2 is associated with 20-30% of breast cancers and is a marker for an aggressive cancer phenotype and a consequent poor prognosis. The formation of ERBB3/ERBB2 heterodimers stimulates cell proliferation and tumor growth (e.g., breast and colon cancer) and, in the case of oral squamous cell carcinoma, correlates with lymph node involvement and patient survival (Shintani et al., Cancer Lett. 95:79, 1995). ErbB4 was found to be expressed in childhood medullo-blastoma with ErbB2 (Gilbertson et al., Cancer Res. 57:3272, 1997) and significantly increased NRG 1-induced activation of ERBB4 was found in patients with schizophrenia (Hahn et al., Nature Med. 12:824, 2006). Therapeutics being developed for some ERBB receptors (e.g., monoclonal antibodies against EGFR and HER2) have led to resistance and/or can have some severe side effects.

[0007] There continues to be a need for alternative effective therapeutic modalities useful for treating or preventing ERBB-associated diseases or disorders in which reduced ERBB gene expression (gene silencing) would be beneficial. The present disclosure meets such needs, and further provides other related advantages.

### BRIEF SUMMARY

[0008] Briefly, the present disclosure provides nicked or gapped double-stranded RNA (dsRNA) comprising at least three strands that is suitable as a substrate for Dicer or as a RISC activator to modify expression of a v-Erb erythroblastic leukemia viral oncogene (ERBB) messenger RNA (mRNA).

[0009] In one aspect, the instant disclosure provides a meroduplex mdRNA molecule, comprising a first strand that is complementary to a human ERBB mRNA as set forth in any one of SEQ ID NO:1158-1161 (i.e., EGFR variants 1, 2, 3, 4), 1803, 1804 (i.e., ERBB2 variants 1, 2), 2543, 2544 (i.e., ERBB3 variants 1, s), or 3121 (i.e., ERBB4), and a second strand and a third strand that are each complementary to non-overlapping regions of the first strand, wherein the second strand and third strands can anneal with the first strand to form at least two double-stranded regions spaced apart by up to 10 nucleotides and thereby forming a gap between the second and third strands, and wherein (a) the mdRNA molecule optionally includes at least one double-stranded region of 5 base pairs to 13 base pairs, or (b) the double-stranded regions combined total about 15 base pairs to about 40 base pairs and the mdRNA molecule optionally has blunt ends. In certain embodiments, the first strand is about 15 to about 40 nucleotides in length, and the second and third strands are each, individually, about 5 to about 20 nucleotides, wherein the combined length of the second and third strands is about 15 nucleotides to about 40 nucleotides. In other embodiments, the first strand is about 15 to about 40 nucleotides in length and is complementary to at least about 15, 16, 17, 18, 19, 20, 21, 22, 23, 24, 25, 26, 27, 28, 29, 30, 31, 32, 33, 34, 35, 36, 37, 38, 39, or 40 contiguous nucleotides of a human ERBB mRNA as set forth in any one of SEQ ID NOS:1158-1161, 1803, 1804, 2543, 2544, and 3121. In still further embodiments, the first strand is about 15 to about 40 nucleotides in length and is at least about 70%, 75%, 80%, 85%, 90%, 95%, 96%, 97%, 98%, or 99% identical to a sequence that is complementary to at least about 15, 16, 17, 18, 19, 20, 21, 22, 23, 24, 25, 26, 27, 28, 29, 30, 31, 32, 33, 34, 35, 36, 37, 38, 39, or 40 contiguous nucleotides of a human ERBB mRNA as set forth in any one of SEQ ID NOS:1158-1161, 1803, 1804, 2543, 2544, and 3121.

[0010] In other embodiments, the mdRNA is a RISC activator (e.g., the first strand has about 15 nucleotides to about 25 nucleotides) or a Dicer substrate (e.g., the first strand has about 26 nucleotides to about 40 nucleotides). In some embodiments, the gap comprises at least one to ten unpaired nucleotides in the first strand positioned between the double-stranded regions formed by the second and third strands when annealed to the first strand, or the gap is a nick. In certain embodiments, the nick or gap is located 10 nucleotides from the 5′-end of the first (antisense) strand or at the Argonaute cleavage site. In another embodiment, the meroduplex nick or gap is positioned such that the thermal stability is maximized for the first and second strand duplex and for the first and third strand duplex as compared to the thermal stability of such meroduplexes having a nick or gap in a different position.

[0011] In another aspect, the instant disclosure provides an mdRNA molecule having a first strand that is complementary to human ERBB mRNA as set forth in any one of SEQ ID NOS:1158-1161, 1803, 1804, 2543, 2544, and 3121, and a second strand and a third strand that is each complementary to non-overlapping regions of the first strand, wherein the second strand and third strand can anneal with the first strand to form at least two double-stranded regions spaced apart by up to 10 nucleotides and thereby forming a gap between the second and third strands, and wherein (a) the mdRNA molecule optionally includes at least one double-stranded region of 5 base pairs to 13 base pairs, or (b) the double-stranded regions combined total about 15 base pairs to about 40 base pairs and the mdRNA molecule optionally has blunt ends; and wherein at least one pyrimidine of the mdRNA comprises a pyrimidine nucleoside according to Formula I or II:

[chemical structure]

wherein R¹ and R² are each independently a —H, —OH, —OCH₃, —OCH₂OCH₂CH₃, —OCH₂CH₂OCH₃, halogen, substituted or unsubstituted C₁-C₁₀ alkyl, alkoxy, alkoxyalkyl, hydroxyalkyl, carboxyalkyl, alkylsulfonylamino, aminoalkyl, dialkylamino, alkylaminoalkyl, dialkylaminoalkyl, haloalkyl, trifluoromethyl, cycloalkyl, (cycloalkyl)alkyl, substituted or unsubstituted C₂-C₁₀ alkenyl, substituted or unsubstituted —O-allyl, —O—CH₂CH═CH₂, —O—CH═CHCH₃, substituted or unsubstituted C₂-C₁₀ alkynyl, carbamoyl, carbamyl, carboxy, carbonylamino, substituted or unsubstituted aryl, substituted or unsubstituted aralkyl, —NH₂, —NO₂, —C≡N, or heterocyclo group; R³ and R⁴ are each independently a hydroxyl, a protected hydroxyl, a phosphate, or an internucleoside linking group; and R⁵ and R⁸ are independently O or S. In certain embodiments, at least one nucleoside is according to Formula I in which R¹ is methyl and R² is —OH. In certain related embodiments, at least one uridine of the dsRNA molecule is replaced with a nucleoside according to Formula I in which R¹ is methyl and R² is —OH, or R¹ is methyl, R² is —OH, and R⁸ is S. In some embodiments, the at least one R¹ is a C₁-C₅ alkyl, such as methyl. In some embodiments, at least one R² is selected from 2′-O—(C₁-C₅)alkyl, 2′-O-methyl, 2′-OCH₂OCH₂CH₃, 2′-OCH₂CH₂OCH₃, 2′-O-allyl, or fluoro. In some embodiments, at least one pyrimidine nucleoside of the mdRNA molecule is a locked nucleic acid (LNA) in the form of a bicyclic sugar, wherein R² is oxygen, and the 2′-O and 4′-C form an oxymethylene bridge on the same ribose ring (e.g., a 5-methyluridine LNA) or is a G clamp. In other embodiments, one or more of the nucleosides are according to Formula I in which R¹ is methyl and R² is a 2′-O—(C₁-C₅)alkyl, such as 2′-O-methyl. In some embodiments, the gap comprises at least one unpaired nucleotide in the first strand positioned between the double-stranded regions formed by the second and third strands when annealed to the first strand, or the gap is a nick. In certain embodiments, the nick or gap is located 10 nucleotides from the 5′-end of the first strand or at the Argonaute cleavage site. In another embodiment, the meroduplex nick or gap is positioned such that the thermal stability is maximized for the first and second strand duplex and for the first and third strand duplex as compared to the thermal stability of such meroduplexes having a nick or gap in a different position.

[0012] In still another aspect, the instant disclosure provides a method for reducing the expression of a human ERBB gene in a cell, comprising administering an mdRNA molecule to a cell expressing an ERBB gene, wherein the mdRNA molecule is capable of specifically binding to an ERBB mRNA and thereby reducing the gene's level of expression in the cell. In a related aspect, there is provided a method of treating or preventing a disease associated with ERBB expression in a subject by administering an mdRNA molecule of this disclosure. In certain embodiments, the cell or subject is human. In certain embodiments, the disease is cancer of one or more of the breast, bladder, prostate, kidney, lung, colon, oesophagus, endometrium, cervix, head and neck, non-small-cell lung, glioma, ovary, pancreas, or oral squamous cells,

[0013] In any of the aspects of this disclosure, some embodiments provide an mdRNA molecule having a 5-methyluridine (ribothymidine), a 2-thioribothymidine, or 2′-O-methyl-5-methyluridine in place of at least one uridine on the first, second, or third strand, or in place of each and every uridine on the first, second, or third strand. In further embodiments, the mdRNA further comprises one or more non-standard nucleoside, such as a deoxyuridine, locked nucleic acid (LNA) molecule, or a universal-binding nucleotide, or a G clamp. Exemplary universal-binding nucleotides include C-phenyl, C-naphthyl, inosine, azole carboxamide, 1-β-D-ribofuranosyl-4-nitroindole, 1-β-D-ribofuranosyl-5-nitroindole, 1-β-D-ribofuranosyl-6-nitroindole, or 1-β-D-ribofuranosyl-3-nitropyrrole. In some embodiments, the mdRNA molecule further comprises a 2′-sugar substitution, such as a 2′-O-methyl, 2′-O-methoxyethyl, 2′-O-2-methoxyethyl, 2′-O-allyl, or halogen (e.g., 2′-fluoro). In certain embodiments, the mdRNA molecule further comprises a terminal cap substituent on one or both ends of one or more of the first strand, second strand, or third strand, such as independently an alkyl, abasic, deoxy abasic, glyceryl, dinucleotide, acyclic nucleotide, or inverted deoxynucleotide moiety. In other embodiments, the mdRNA molecule further comprises at least one modified internucleoside linkage, such as independently a phosphorothioate, chiral phosphorothioate, phosphorodithioate, phosphotriester, aminoalkylphosphotriester, methyl phosphonate, alkyl phosphonate, 3′-alkylene phosphonate, 5′-alkylene phosphonate, chiral phosphonate, phosphonoacetate, thiophosphonoacetate, phosphinate, phosphoramidate, 3′-amino phosphoramidate, aminoalkylphosphoramidate, thionophosphoramidate, selenophosphate, thionoalkylphosphonate, thionoalkylphosphotriester, or boranophosphate linkage.

[0014] In any of the aspects of this disclosure, some embodiments provide an mdRNA comprising an overhang of one to four nucleotides on at least one 3′-end that is not part of the gap, such as at least one deoxyribonucleotide or two deoxyribonucleotides (e.g., thymidine). In some embodiments, at least one or two 5′-terminal ribonucleotide of the second strand within the double-stranded region comprises a 2′-sugar substitution. In related embodiments, at least one or two 5′-terminal ribonucleotide of the first strand within the double-stranded region comprises a 2′-sugar substitution. In other related embodiments, at least one or two 5′-terminal ribonucleotide of the second strand and at least one or two 5′-terminal ribonucleotide of the first strand within the double-stranded regions comprise independent 2′-sugar substitutions. In other embodiments, the mdRNA molecule comprises at least three 5-methyluridines within at least one double-stranded region. In some embodiments, the mdRNA molecule has a blunt end at one or both ends. In other embodiments, the 5′-terminal of the third strand is a hydroxyl or a phosphate.

### BRIEF DESCRIPTION OF THE DRAWINGS

[0015] FIG. 1 shows the gene silencing activity of ten different EGFR-specific nicked and gapped dsRNA Dicer substrates. This is the graphical representation of the data found in Table 1 (the Complex numbers on the x-axis correspond to the Set numbers for each of the ten different EGFR dsRNAs shown in Table 1).

[0016] FIG. 2 shows knockdown activity for RISC activator lacZ dsRNA (21 nucleotide sense strand/21 nucleotide antisense strand; 21/21), Dicer substrate lacZ dsRNA (25 nucleotide sense strand/27 nucleotide antisense strand; 25/27), and meroduplex lacZ mdRNA (13 nucleotide sense strand and 11 nucleotide sense strand/27 nucleotide antisense strand; 13, 11/27—the sense strand is missing one nucleotide so that a single nucleotide gap is left between the 13 nucleotide and 11 nucleotide sense strands when annealed to the 27 nucleotide antisense strand. Knockdown activities were normalized to a Qneg control dsRNA and presented as a normalized value of Qneg (i.e., Qneg represents 100% or “normal” gene expression levels). A smaller value indicates a greater knockdown effect.

[0017] FIG. 3 shows knockdown activity of a RISC activator influenza dsRNA G1498 (21/21) and nicked dsRNA (10, 11/21) at 100 nM. The “wt” designation indicates an unsubstituted RNA molecule; “rT” indicates RNA having each uridine substituted with a ribothymidine; and “p” indicates that the 5′-nucleotide of that strand was phosphorylated. The 21 nucleotide sense and antisense strands of G1498 were individually nicked between the nucleotides 10 and 11 as measured from the 5′-end, and is referred to as 11, 10/21 and 21/10, 11, respectively. The G1498 single stranded 21 nucleotide antisense strand alone (designated AS-only) was used as a control.

[0018] FIG. 4 shows knockdown activity of a lacZ dicer substrate (25/27) having a nick in one of each of positions 8 to 14 and a one nucleotide gap at position 13 of the sense strand (counted from the 5′-end). A dideoxy guanosine (ddG) was incorporated at the 5′-end of the 3′-most strand of the nicked or gapped sense sequence at position 13.

[0019] FIG. 5 shows knockdown activity of a dicer substrate influenza dsRNA G1498DS (25/27) and this sequence nicked at one of each of positions 8 to 14 of the sense strand, and shows the activity of these nicked molecules that are also phosphorylated or have a locked nucleic acid substitution.

[0020] FIG. 6 shows a dose dependent knockdown activity a dicer substrate influenza dsRNA G1498DS (25/27) and this sequence nicked at position 13 of the sense strand.

[0021] FIG. 7 shows knockdown activity of a dicer substrate influenza dsRNA G1498DS having a nick or a gap of one to six nucleotides that begins at any one of positions 8 to 12 of the sense strand.

[0022] FIG. 8 shows knockdown activity of a LacZ RISC dsRNA having a nick or a gap of one to six nucleotides that begins at any one of positions 8 to 14 of the sense strand.

[0023] FIG. 9 shows knockdown activity of an influenza RISC dsRNA having a nick at any one of positions 8 to 14 of the sense strand and further having one or two locked nucleic acids (LNA) per sense strand. The inserts on the right side of the graph provides a graphic depiction of the meroduplex structures (for clarity, a single antisense strand is shown at the bottom of the grouping with each of the different nicked sense strands above the antisense) having different nick positions with the relative positioning of the LNAs on the sense strands.

[0024] FIG. 10 shows knockdown activity of a LacZ dicer substrate dsRNA having a nick at any one of positions 8 to 14 of the sense strand as compared to the same nicked dicer substrates but having a locked nucleic acid substitution.

[0025] FIG. 11 shows the percent knockdown in influenza viral titers using influenza specific mdRNA against influenza strain WSN.

[0026] FIG. 12 shows the in vivo reduction in PR8 influenza viral titers using influenza specific mdRNA as measured by TCID₅₀.

### DETAILED DESCRIPTION

[0027] The instant disclosure is predicated upon the unexpected discovery that a nicked or gapped double-stranded RNA (dsRNA) comprising at least three strands is a suitable substrate for Dicer or RISC and, therefore, may be advantageously employed for gene silencing via, for example, the RNA interference pathway. That is, partially duplexed dsRNA molecules described herein (also referred to as meroduplexes having a nick or gap in at least one strand) are capable of initiating an RNA interference cascade that modifies (e.g., reduces) expression of a target messenger RNA (mRNA), such as a human v-Erb erythroblastic leukemia viral oncogene (ERBB) mRNA. This is surprising because a person of skill in the art would expect the thermodynamically less stable nicked or gapped dsRNA passenger strand (as compared to an intact dsRNA) to fall apart before any gene silencing effect would result (see, e.g., Leuschner et al., EMBO 7:314, 2006).

[0028] Meroduplex ribonucleic acid (mdRNA) molecules described herein include a first (antisense) strand that is complementary to a human ERBB mRNA as set forth in any one of SEQ ID NOS:1158-1161, 1803, 1804, 2543, 2544, and 3121, along with second and third strands (together forming a gapped sense strand) that are each complementary to non-overlapping regions of the first strand, wherein the second and third strands can anneal with the first strand to form at least two double-stranded regions separated by a gap, and wherein at least one double-stranded region is from about 5 base pairs to about 15 base pairs, or the combined double-stranded regions total about 15 base pairs to about 40 base pairs and the mdRNA is blunt-ended. The gap can be from 0 nucleotides (i.e., a nick in which only a phosphodiester bond between two nucleotides is broken in a polynucleotide molecule) up to about 10 nucleotides (i.e., the first strand will have at least one unpaired nucleotide). In certain embodiments, the nick or gap is located 10 nucleotides from the 5′-end of the first (antisense) strand or at the Argonaute cleavage site. In another embodiment, the meroduplex nick or gap is positioned such that the thermal stability is maximized for the first and second strand duplex and for the first and third strand duplex as compared to the thermal stability of such meroduplexes having a nick or gap in a different position. Also provided herein are methods of using such dsRNA to reduce expression of an ERBB gene in a cell or to treat or prevent diseases or disorders associated with ERBB gene expression, including cancer of one or more of the breast, bladder, prostate, kidney, lung, colon, oesophagus, endometrium, cervix, head and neck, non-small-cell lung, glioma, ovary, pancreas, and oral squamous cells.

[0029] Prior to introducing more detail to this disclosure, it may be helpful to an appreciation thereof to provide definitions of certain terms to be used herein.

[0030] In the present description, any concentration range, percentage range, ratio range, or integer range is to be understood to include the value of any integer within the recited range and, when appropriate, fractions thereof (such as one tenth and one hundredth of an integer), unless otherwise indicated. Also, any number range recited herein relating to any physical feature, such as polymer subunits, size or thickness, are to be understood to include any integer within the recited range, unless otherwise indicated. As used herein, “about” or “consisting essentially of” mean ±20% of the indicated range, value, or structure, unless otherwise indicated. As used herein, the terms “include” and “comprise” are open ended and are used synonymously. It should be understood that the terms “a” and “an” as used herein refer to “one or more” of the enumerated components. The use of the alternative (e.g., “or”) should be understood to mean either one, both, or any combination thereof of the alternatives.

[0031] As used herein, the term “isolated” means that the referenced material (e.g., nucleic acid molecules of the instant disclosure), is removed from its original environment, such as being separated from some or all of the co-existing materials in a natural environment (e.g., a natural environment may be a cell).

[0032] As used herein, “complementary” refers to a nucleic acid molecule that can form hydrogen bond(s) with another nucleic acid molecule or itself by either traditional Watson-Crick base pairing or other non-traditional types of pairing (e.g., Hoogsteen or reversed Hoogsteen hydrogen bonding) between complementary nucleosides or nucleotides. In reference to the nucleic molecules of the present disclosure, the binding free energy for a nucleic acid molecule with its complementary sequence is sufficient to allow the relevant function of the nucleic acid molecule to proceed, for example, RNAi activity, and there is a sufficient degree of complementarity to avoid non-specific binding of the nucleic acid molecule (e.g., dsRNA) to non-target sequences under conditions in which specific binding is desired, i.e., under physiological conditions in the case of in vivo assays or therapeutic treatment, or under conditions in which the assays are performed in the case of in vitro assays (e.g., hybridization assays). Determination of binding free energies for nucleic acid molecules is well known in the art (see, e.g., Turner et al., CSH Symp. Quant. Biol. LII:123, 1987; Frier et al., Proc. Nat'l. Acad. Sci. USA 83:9373, 1986; Turner et al., J. Am. Chem. Soc. 109:3783, 1987). Thus, “complementary” or “specifically hybridizable” or “specifically binds” are terms that indicate a sufficient degree of complementarity or precise pairing such that stable and specific binding occurs between a nucleic acid molecule (e.g., dsRNA) and a DNA or RNA target. It is understood in the art that a nucleic acid molecule need not be 100% complementary to a target nucleic acid sequence to be specifically hybridizable or to specifically bind. That is, two or more nucleic acid molecules may be less than fully complementary and is indicated by a percentage of contiguous residues in a nucleic acid molecule that can form hydrogen bonds with a second nucleic acid molecule.

[0033] For example, a first nucleic acid molecule may have 10 nucleotides and a second nucleic acid molecule may have 10 nucleotides, then base pairing of 5, 6, 7, 8, 9, or 10 nucleotides between the first and second nucleic acid molecules, which may or may not form a contiguous double-stranded region, represents 50%, 60%, 70%, 80%, 90%, and 100% complementarity, respectively. In certain embodiments, complementary nucleic acid molecules may have wrongly paired bases—that is, bases that cannot form a traditional Watson-Crick base pair or other non-traditional types of pair (i.e., “mismatched” bases). For instance, complementary nucleic acid molecules may be identified as having a certain number of “mismatches,” such as zero or about 1, about 2, about 3, about 4 or about 5.

[0034] “Perfectly” or “fully” complementary nucleic acid molecules means those in which a certain number of nucleotides of a first nucleic acid molecule hydrogen bond (anneal) with the same number of residues in a second nucleic acid molecule to form a contiguous double-stranded region. For example, two or more fully complementary nucleic acid molecule strands can have the same number of nucleotides (i.e., have the same length and form one double-stranded region, with or without an overhang) or have a different number of nucleotides (e.g., one strand may be shorter than but fully contained within a second strand or one strand may overhang the second strand).

[0035] By “ribonucleic acid” or “RNA” is meant a nucleic acid molecule comprising at least one ribonucleotide molecule. As used herein, “ribonucleotide” refers to a nucleotide with a hydroxyl group at the 2′-position of a β-D-ribofuranose moiety. The term RNA includes double-stranded (ds) RNA, single-stranded (ss) RNA, isolated RNA (such as partially purified RNA, essentially pure RNA, synthetic RNA, recombinantly produced RNA), altered RNA (which differs from naturally occurring RNA by the addition, deletion, substitution or alteration of one or more nucleotides), or any combination thereof. For example, such altered RNA can include addition of non-nucleotide material, such as at one or both ends of an RNA molecule, internally at one or more nucleotides of the RNA, or any combination thereof. Nucleotides in RNA molecules of the instant disclosure can also comprise non-standard nucleotides, such as naturally occurring nucleotides, non-naturally occurring nucleotides, chemically-modified nucleotides, deoxynucleotides, or any combination thereof. These altered RNAs may be referred to as analogs or analogs of RNA containing standard nucleotides (i.e., standard nucleotides, as used herein, are considered to be adenine, cytidine, guanidine, thymidine, and uridine).

[0036] The term “dsRNA” as used herein, which is interchangeable with “mdRNA,” refers to any nucleic acid molecule comprising at least one ribonucleotide molecule and capable of inhibiting or down regulating gene expression, for example, by promoting RNA interference (“RNAi”) or gene silencing in a sequence-specific manner. The dsRNAs (mdRNAs) of the instant disclosure may be suitable substrates for Dicer or for association with RISC to mediate gene silencing by RNAi. Examples of dsRNA molecules of this disclosure are provided in the Sequence Listing identified herein. One or both strands of the dsRNA can further comprise a terminal phosphate group, such as a 5′-phosphate or 5′,3′-diphosphate. As used herein, dsRNA molecules, in addition to at least one ribonucleotide, can further include substitutions, chemically-modified nucleotides, and non-nucleotides. In certain embodiments, dsRNA molecules comprise ribonucleotides up to about 100% of the nucleotide positions.

[0037] In addition, as used herein, the term dsRNA is meant to be equivalent to other terms used to describe nucleic acid molecules that are capable of mediating sequence specific RNAi, for example, meroduplex RNA (mdRNA), nicked dsRNA (ndsRNA), gapped dsRNA (gdsRNA), short interfering nucleic acid (siNA), siRNA, micro-RNA (miRNA), short hairpin RNA (shRNA), short interfering oligonucleotide, short interfering substituted oligonucleotide, short interfering modified oligonucleotide, chemically-modified dsRNA, post-transcriptional gene silencing RNA (ptgsRNA), or the like. The term “large double-stranded RNA” (“large dsRNA”) refers to any double-stranded RNA longer than about 40 base pairs (bp) to about 100 bp or more, particularly up to about 300 bp to about 500 bp. The sequence of a large dsRNA may represent a segment of an mRNA or an entire mRNA. A double-stranded structure may be formed by a self-complementary nucleic acid molecule or by annealing of two or more distinct complementary nucleic acid molecule strands.

[0038] In one aspect, a dsRNA comprises two separate oligonucleotides, comprising a first strand (antisense) and a second strand (sense), wherein the antisense and sense strands are self-complementary (i.e., each strand comprises a nucleotide sequence that is complementary to a nucleotide sequence in the other strand and the two separate strands form a duplex or double-stranded structure, for example, wherein the double-stranded region is about 15 to about 24 base pairs or about 26 to about 40 base pairs); the antisense strand comprises a nucleotide sequence that is complementary to a nucleotide sequence in a target nucleic acid molecule or a portion thereof (e.g., a human ERBB mRNA of any one of SEQ ID NOS:1158-1161, 1803, 1804, 2543, 2544, and 3121); and the sense strand comprises a nucleotide sequence corresponding (i.e., homologous) to the target nucleic acid sequence or a portion thereof (e.g., a sense strand of about 15 to about 25 nucleotides or about 26 to about 40 nucleotides corresponds to the target nucleic acid or a portion thereof).

[0039] In another aspect, the dsRNA is assembled from a single oligonucleotide in which the self-complementary sense and antisense strands of the dsRNA are linked together by a nucleic acid based-linker or a non-nucleic acid-based linker. In certain embodiments, the first (antisense) and second (sense) strands of the dsRNA molecule are covalently linked by a nucleotide or non-nucleotide linker as described herein and known in the art. In other embodiments, a first dsRNA molecule is covalently linked to at least one second dsRNA molecule by a nucleotide or non-nucleotide linker known in the art, wherein the first dsRNA molecule can be linked to a plurality of other dsRNA molecules that can be the same or different, or any combination thereof. In another embodiment, the linked dsRNA may include a third strand that forms a meroduplex with the linked dsRNA.

[0040] In still another aspect, dsRNA molecules described herein form a meroduplex RNA (mdRNA) having three or more strands such as, for example, an ‘A’ (first or antisense) strand, ‘S1’ (second) strand, and ‘S2’ (third) strand in which the ‘S1’ and ‘S2’ strands are complementary to and form base pairs (bp) with non-overlapping regions of the ‘A’ strand (e.g., an mdRNA can have the form of A:S1S2). The double-stranded region formed by the annealing of the ‘S1’ and ‘A’ strands is distinct from and non-overlapping with the double-stranded region formed by the annealing of the ‘S2’ and ‘A’ strands. An mdRNA molecule is a “gapped” molecule, i.e., it contains a “gap” ranging from 0 nucleotides up to about 10 nucleotides (or a gap of 11, 12, 13, 14, 15, 16, 17, 18, 19, 20, 21, 22, 23, 24, 25, 26, 27, 28, 29, 30, 31, 32, 33, 34 or 35 nucleotides). In one embodiment, the A:S1 duplex is separated from the A:S2 duplex by a gap resulting from at least one unpaired nucleotide (up to about 10 unpaired nucleotides) in the ‘A’ strand that is positioned between the A:S1 duplex and the A:S2 duplex and that is distinct from any one or more unpaired nucleotide at the 3′-end of one or more of the ‘A’, ‘S1’, or ‘S2’ strands. In another embodiment, the A:S1 duplex is separated from the A:S2 duplex by a gap of zero nucleotides (i.e., a nick in which only a phosphodiester bond between two nucleotides is broken or missing in the polynucleotide molecule) between the A:S1 duplex and the A:S2 duplex—which can also be referred to as nicked dsRNA (ndsRNA). For example, A:S1S2 may be comprised of a dsRNA having at least two double-stranded regions that combined total about 14 base pairs to about 40 base pairs and the double-stranded regions are separated by a gap of 0, 1, 2, 3, 4, 5, 6, 7, 8, 9, 10, 11, 12, 13, 14, 15, 16, 17, 18, 19, 20, 21, 22, 23, 24, 25, 26, 27, 28, 29, 30, 31, 32, 33, 34 or 35 nucleotides, optionally having blunt ends, or A:S1S2 may comprise a dsRNA having at least two double-stranded regions spaced apart by up to 10 nucleotides and thereby forming a gap between the second and third strands wherein at least one of the double-stranded regions optionally has from 5 base pairs to 13 base pairs.

[0041] A dsRNA or large dsRNA may include a substitution or modification in which the substitution or modification may be in a phosphate backbone bond, a sugar, a base, or a nucleoside. Such nucleoside substitutions can include natural non-standard nucleosides (e.g., 5-methyluridine or 5-methylcytidine or a 2-thioribothymidine), and such backbone, sugar, or nucleoside modifications can include an alkyl or heteroatom substitution or addition, such as a methyl, alkoxyalkyl, halogen, nitrogen or sulfur, or other modifications known in the art.

[0042] In addition, as used herein, the term “RNAi” is meant to be equivalent to other terms used to describe sequence specific RNA interference, such as post transcriptional gene silencing, translational inhibition, or epigenetics. For example, dsRNA molecules of this disclosure can be used to epigenetically silence genes at the post-transcriptional level or the pre-transcriptional level or any combination thereof.

[0043] As used herein, “target nucleic acid” refers to any nucleic acid sequence whose expression or activity is to be altered (e.g., ERBB). The target nucleic acid can be DNA, RNA, or analogs thereof, and includes single, double, and multi-stranded forms. By “target site” or “target sequence” is meant a sequence within a target nucleic acid (e.g., mRNA) that, when present in an RNA molecule, is “targeted” for cleavage by RNAi and mediated by a dsRNA construct of this disclosure containing a sequence within the antisense strand that is complementary to the target site or sequence.

[0044] As used herein, “off-target effect” or “off-target profile” refers to the observed altered expression pattern of one or more genes in a cell or other biological sample not targeted, directly or indirectly, for gene silencing by an mdRNA or dsRNA. For example, an off-target effect can be quantified by using a DNA microarray to determine how many non-target genes have an expression level altered by about two-fold or more in the presence of a candidate mdRNA or dsRNA, or analog thereof specific for a target sequence, such as an ERBB mRNA. A “minimal off-target effect” means that an mdRNA or dsRNA affects expression by about two-fold or more of about 25% to about 1% of the non-target genes examined or it means that the off-target effect of substituted or modified mdRNA or dsRNA (e.g., having at least one uridine substituted with a 5-methyluridine or 2-thioribothymidine and optionally having at least one nucleotide modified at the 2′-position), is reduced by at least about 1% to about 80% or more as compared to the effect on non-target genes of an unsubstituted or unmodified mdRNA or dsRNA.

[0045] By “sense region” or “sense strand” is meant one or more nucleotide sequences of a dsRNA molecule having complementarity to one or more antisense regions of the dsRNA molecule. In addition, the sense region of a dsRNA molecule comprises a nucleic acid sequence having homology or identity to a target sequence, such as ERBB. By “antisense region” or “antisense strand” is meant a nucleotide sequence of a dsRNA molecule having complementarity to a target nucleic acid sequence, such as ERBB. In addition, the antisense region of a dsRNA molecule can comprise nucleic acid sequence region having complementarity to one or more sense strands of the dsRNA molecule.

[0046] “Analog” as used herein refers to a compound that is structurally similar to a parent compound (e.g., a nucleic acid molecule), but differs slightly in composition (e.g., one atom or functional group is different, added, or removed). The analog may or may not have different chemical or physical properties than the original compound and may or may not have improved biological or chemical activity. For example, the analog may be more hydrophilic or it may have altered activity as compared to a parent compound. The analog may mimic the chemical or biological activity of the parent compound (i.e., it may have similar or identical activity), or, in some cases, may have increased or decreased activity. The analog may be a naturally or non-naturally occurring (e.g., chemically-modified or recombinant) variant of the original compound. An example of an RNA analog is an RNA molecule having a non-standard nucleotide, such as 5-methyuridine or 5-methylcytidine or 2-thioribothymidine, which may impart certain desirable properties (e.g., improve stability, bioavailability, minimize off-target effects or interferon response).

[0047] As used herein, the term “universal base” refers to nucleotide base analogs that form base pairs with each of the standard DNA/RNA bases with little discrimination between them. A universal base is thus interchangeable with all of the standard bases when substituted into a nucleotide duplex (see, e.g., Loakes et al., J. Mol. Bio. 270:426, 1997). Examplary universal bases include C-phenyl, C-naphthyl and other aromatic derivatives, inosine, azole carboxamides, or nitroazole derivatives such as 3-nitropyrrole, 4-nitroindole, 5-nitroindole, and 6-nitroindole (see, e.g., Loakes, Nucleic Acids Res. 29:2437, 2001).

[0048] The term “gene” as used herein, especially in the context of “target gene” or “gene target” for RNAi, means a nucleic acid molecule that encodes an RNA or a transcription product of such gene, including a messenger RNA (mRNA, also referred to as structural genes that encode for a polypeptide), an mRNA splice variant of such gene, a functional RNA (fRNA), or non-coding RNA (ncRNA), such as small temporal RNA (stRNA), microRNA (miRNA), small nuclear RNA (snRNA), short interfering RNA (siRNA), small nucleolar RNA (snRNA), ribosomal RNA (rRNA), transfer RNA (tRNA) and precursor RNAs thereof. Such non-coding RNAs can serve as target nucleic acid molecules for dsRNA mediated RNAi to alter the activity of the target RNA involved in functional or regulatory cellular processes.

[0049] As used herein, “gene silencing” refers to a partial or complete loss-of-function through targeted inhibition of gene expression in a cell, which may also be referred to as RNAi “knockdown,” “inhibition,” “down-regulation,” or “reduction” of expression of a target gene, such as a human ERBB gene. Depending on the circumstances and the biological problem to be addressed, it may be preferable to partially reduce gene expression. Alternatively, it might be desirable to reduce gene expression as much as possible. The extent of silencing may be determined by methods described herein and known in the art (see, e.g., PCT Publication No. WO 99/32619; Elbashir et al., EMBO J. 20:6877, 2001). Depending on the assay, quantification of gene expression permits detection of various amounts of inhibition that may be desired in certain embodiments of this disclosure, including prophylactic and therapeutic methods, which will be capable of knocking down target gene expression, in terms of mRNA level or protein level or activity, for example, by equal to or greater than 10%, 30%, 50%, 75% 90%, 95% or 99% of baseline (i.e., normal) or other control levels, including elevated expression levels as may be associated with particular disease states or other conditions targeted for therapy.

[0050] As used herein, the term “therapeutically effective amount” means an amount of dsRNA that is sufficient to result in a decrease in severity of disease symptoms, an increase in frequency or duration of disease symptom-free periods, or a prevention of impairment or disability due to the disease, in the subject (e.g., human) to which it is administered. For example, a therapeutically effective amount of dsRNA directed against an mRNA of ERBB (e.g., SEQ ID NOS:1158-1161, 1803, 1804, 2543, 2544, and 3121) can inhibit the deposition of lipoproteins in the walls of arteries by at least about 20%, at least about 40%, at least about 60%, or at least about 80% relative to untreated subjects. A therapeutically effective amount of a therapeutic compound can decrease, for example, atheromatous plaque size or otherwise ameliorate symptoms in a subject. One of ordinary skill in the art would be able to determine such therapeutically effective amounts based on such factors as the subject's size, the severity of symptoms, and the particular composition or route of administration selected. The nucleic acid molecules of the instant disclosure, individually, or in combination or in conjunction with other drugs, can be used to treat diseases or conditions discussed herein. For example, to treat a particular disease, disorder, or condition, the dsRNA molecules can be administered to a patient or can be administered to other appropriate cells evident to those skilled in the art, individually or in combination with one or more drugs, under conditions suitable for treatment.

[0051] In addition, one or more dsRNA may be used to knockdown expression of an ERBB mRNA as set forth in any one of SEQ ID NOS: 1158-1161, 1803, 1804, 2543, 2544, and 3121, or a related mRNA splice variant. In this regard it is noted that an ERBB gene may be transcribed into two or more mRNA splice variants; and thus, for example, in certain embodiments, knockdown of one mRNA splice variant without affecting the other mRNA splice variant may be desired, or vice versa; or knockdown of all transcription products may be targeted.

[0052] In addition, it should be understood that the individual compounds, or groups of compounds, derived from the various combinations of the structures and substituents described herein, are disclosed by the present application to the same extent as if each compound or group of compounds was set forth individually. Thus, selection of particular structures or particular substituents is within the scope of the present disclosure. As described herein, all value ranges are inclusive over the indicated range. Thus, a range of C₁-C₄ will be understood to include the values of 1, 2, 3, and 4, such that C₁, C₂, C₃ and C₄ are included.

[0053] The term “alkyl” as used herein refers to saturated straight- or branched-chain aliphatic groups containing from 1-20 carbon atoms, preferably 1-8 carbon atoms and most preferably 1-4 carbon atoms. This definition applies as well to the alkyl portion of alkoxy, alkanoyl and aralkyl groups. The alkyl group may be substituted or unsubstituted. In certain embodiments, the alkyl is a (C₁-C₄) alkyl or methyl.

[0054] The term “cycloalkyl” as used herein refers to a saturated cyclic hydrocarbon ring system containing from 3 to 12 carbon atoms that may be optionally substituted. Exemplary embodiments include, but are not limited to, cyclopropyl, cyclobutyl, cyclopentyl and cyclohexyl. In certain embodiments, the cycloalkyl group is cyclopropyl. In another embodiment, the (cycloalkyl)alkyl groups contain from 3 to 12 carbon atoms in the cyclic portion and 1 to 6 carbon atoms in the alkyl portion. In certain embodiments, the (cycloalkyl)alkyl group is cyclopropylmethyl. The alkyl groups are optionally substituted with from one to three substituents selected from the group consisting of halogen, hydroxy and amino.

[0055] The terms “alkanoyl” and “alkanoyloxy” as used herein refer, respectively, to —C(O)-alkyl groups and —O—C(═O)— alkyl groups, each optionally containing 2 to 10 carbon atoms. Specific embodiments of alkanoyl and alkanoyloxy groups are acetyl and acetoxy, respectively.

[0056] The term “alkenyl” refers to an unsaturated branched, straight-chain or cyclic alkyl group having 2 to 15 carbon atoms and having at least one carbon-carbon double bond derived by the removal of one hydrogen atom from a single carbon atom of a parent alkene. The group may be in either the cis or trans conformation about the double bond(s). Certain embodiments include ethenyl, 1-propenyl, 2-propenyl, 1-methylethenyl, 1-butenyl, 2-butenyl, 3-butenyl, 2-methyl-2-propenyl, 1-pentenyl, 2-pentenyl, 4-pentenyl, 3-methyl-2-butenyl, 1-hexenyl, 2-hexenyl, 1-heptenyl, 2-heptenyl, 1-octenyl, 2-octenyl, 1,3-octadienyl, 2-nonenyl, 1,3-nonadienyl, 2-decenyl, etc., or the like. The alkenyl group may be substituted or unsubstituted.

[0057] The term “alkynyl” as used herein refers to an unsaturated branched, straight-chain, or cyclic alkyl group having 2 to 10 carbon atoms and having at least one carbon-carbon triple bond derived by the removal of one hydrogen atom from a single carbon atom of a parent alkyne. Exemplary alkynyls include ethynyl, 1-propynyl, 2-propynyl, 1-butynyl, 2-butynyl, 3-butynyl, 1-pentynyl, 2-pentynyl, 4-pentynyl, 1-octynyl, 6-methyl-1-heptynyl, 2-decynyl, or the like. The alkynyl group may be substituted or unsubstituted.

[0058] The term “hydroxyalkyl” alone or in combination, refers to an alkyl group as previously defined, wherein one or several hydrogen atoms, preferably one hydrogen atom has been replaced by a hydroxyl group. Examples include hydroxymethyl, hydroxyethyl and 2-hydroxyethyl.

[0059] The term “aminoalkyl” as used herein refers to the group —NRR′, where R and R′ may independently be hydrogen or (C₁-C₄) alkyl.

[0060] The term “alkylaminoalkyl” refers to an alkylamino group linked via an alkyl group (i.e., a group having the general structure-alkyl-NH-alkyl or -alkyl-N(alkyl)(alkyl)). Such groups include, but are not limited to, mono- and di-(C₁-C₈ alkyl)aminoC₁-C₈ alkyl, in which each alkyl may be the same or different.

[0061] The term “dialkylaminoalkyl” refers to alkylamino groups attached to an alkyl group. Examples include, but are not limited to, N,N-dimethylaminomethyl, N,N-dimethylaminoethyl N,N-dimethylaminopropyl, and the like. The term dialkylaminoalkyl also includes groups where the bridging alkyl moiety is optionally substituted.

[0062] The term “haloalkyl” refers to an alkyl group substituted with one or more halo groups, for example chloromethyl, 2-bromoethyl, 3-iodopropyl, trifluoromethyl, perfluoropropyl, 8-chlorononyl, or the like.

[0063] The term “carboxyalkyl” as used herein refers to the substituent —R¹⁰—COOH, wherein R¹⁰ is alkylene; and “carbalkoxyalkyl” refers to —R¹⁰—C(═O)OR¹¹, wherein R¹⁰ and R¹¹ are alkylene and alkyl respectively. In certain embodiments, alkyl refers to a saturated straight- or branched-chain hydrocarbyl radical of 1 to 6 carbon atoms such as methyl, ethyl, n-propyl, isopropyl, n-butyl, t-butyl, n-pentyl, 2-methylpentyl, n-hexyl, and so forth. Alkylene is the same as alkyl except that the group is divalent.

[0064] The term “alkoxy” includes substituted and unsubstituted alkyl, alkenyl, and alkynyl groups covalently linked to an oxygen atom. In one embodiment, the alkoxy group contains 1 to about 10 carbon atoms. Embodiments of alkoxy groups include, but are not limited to, methoxy, ethoxy, isopropyloxy, propoxy, butoxy, and pentoxy groups. Embodiments of substituted alkoxy groups include halogenated alkoxy groups. In a further embodiment, the alkoxy groups can be substituted with groups such as alkenyl, alkynyl, halogen, hydroxyl, alkylcarbonyloxy, arylcarbonyloxy, alkoxycarbonyloxy, aryloxycarbonyloxy, carboxylate, alkylcarbonyl, arylcarbonyl, alkoxycarbonyl, aminocarbonyl, alkylaminocarbonyl, dialkylaminocarbonyl, alkylthiocarbonyl, alkoxyl, phosphate, phosphonato, phosphinato, cyano, amino (including alkylamino, dialkylamino, arylamino, diarylamino, and alkylarylamino), acylamino (including alkylcarbonylamino, arylcarbonylamino, carbamoyl and ureido), amidino, imino, sulfhydryl, alkylthio, arylthio, thiocarboxylate, sulfates, alkylsulfinyl, sulfonato, sulfamoyl, sulfonamido, nitro, trifluoromethyl, cyano, azido, heterocyclyl, alkylaryl, or an aromatic or heteroaromatic moieties. Exemplary halogen substituted alkoxy groups include, but are not limited to, fluoromethoxy, difluoromethoxy, trifluoromethoxy, chloromethoxy, dichloromethoxy, and trichloromethoxy.

[0065] The term “alkoxyalkyl” refers to an alkylene group substituted with an alkoxy group. For example, methoxyethyl (CH₃OCH₂CH₂—) and ethoxymethyl (CH₃CH₂OCH₂—) are both C₃ alkoxyalkyl groups.

[0066] The term “aryl” as used herein refers to monocyclic or bicyclic aromatic hydrocarbon groups having from 6 to 12 carbon atoms in the ring portion, for example, phenyl, naphthyl, biphenyl and diphenyl groups, each of which may be substituted with, for example, one to four substituents such as alkyl; substituted alkyl as defined above, halogen, trifluoromethyl, trifluoromethoxy, hydroxy, alkoxy, cycloalkyloxy, alkanoyl, alkanoyloxy, amino, alkylamino, dialkylamino, nitro, cyano, carboxy, carboxyalkyl, carbamyl, carbamoyl and aryloxy. Specific embodiments of aryl groups in accordance with the present disclosure include phenyl, substituted phenyl, naphthyl, biphenyl, and diphenyl.

[0067] The term “aroyl,” as used alone or in combination herein, refers to an aryl radical derived from an aromatic carboxylic acid, such as optionally substituted benzoic or naphthoic acids.

[0068] The term “aralkyl” as used herein refers to an aryl group bonded to the 2-pyridinyl ring or the 4-pyridinyl ring through an alkyl group, preferably one containing 1 to 10 carbon atoms. A preferred aralkyl group is benzyl.

[0069] The term “carboxy,” as used herein, represents a group of the formula —C(═O)OH or —C(═O)O⁻.

[0070] The term “carbonyl” as used herein refers to a group in which an oxygen atom is double-bonded to a carbon atom —C═O.

[0071] The term “trifluoromethyl” as used herein refers to —CF₃.

[0072] The term “trifluoromethoxy” as used herein refers to —OCF₃.

[0073] The term “hydroxyl” as used herein refers to —OH or —O⁻.

[0074] The term “nitrile” or “cyano” as used herein refers to the group —CN.

[0075] The term “nitro,” as used herein alone or in combination refers to a —NO₂ group.

[0076] The term “amino” as used herein refers to the group —NR⁹R⁹, wherein R⁹ may independently be hydrogen, alkyl, aryl, alkoxy, or heteroaryl. The term “aminoalkyl” as used herein represents a more detailed selection as compared to “amino” and refers to the group —NR′R′, wherein R′ may independently be hydrogen or (C₁-C₄) alkyl. The term “dialkylamino” refers to an amino group having two attached alkyl groups that can be the same or different.

[0077] The term “alkanoylamino” refers to alkyl, alkenyl or alkynyl groups containing the group —C(═O)— followed by —N(H)—, for example acetylamino, propanoylamino and butanoylamino and the like.

[0078] The term “carbonylamino” refers to the group —NR′-CO—CH₂—R′, wherein R′ may be independently selected from hydrogen or (C₁-C₄) alkyl.

[0079] The term “carbamoyl” as used herein refers to —O—C(O)NH₂.

[0080] The term “carbamyl” as used herein refers to a functional group in which a nitrogen atom is directly bonded to a carbonyl, i.e., as in —NR″C(═O)R″ or —C(═O)NR″R″, wherein R″ can be independently hydrogen, alkyl, substituted alkyl, alkenyl, substituted alkenyl, alkoxy, cycloalkyl, aryl, heterocyclo, or heteroaryl.

[0081] The term “alkylsulfonylamino” refers to the group —NHS(O)₂R¹², wherein R¹² is alkyl.

[0082] The term “halogen” as used herein refers to bromine, chlorine, fluorine or iodine. In one embodiment, the halogen is fluorine. In another embodiment, the halogen is chlorine.

[0083] The term “heterocyclo” refers to an optionally substituted, unsaturated, partially saturated, or fully saturated, aromatic or nonaromatic cyclic group that is a 4 to 7 membered monocyclic, or 7 to 11 membered bicyclic ring system that has at least one heteroatom in at least one carbon atom-containing ring. The substituents on the heterocyclo rings may be selected from those given above for the aryl groups. Each ring of the heterocyclo group containing a heteroatom may have 1, 2, or 3 heteroatoms selected from nitrogen, oxygen or sulfur. Plural heteroatoms in a given heterocyclo ring may be the same or different.

[0084] Exemplary monocyclic heterocyclo groups include pyrrolidinyl, pyrrolyl, indolyl, pyrazolyl, imidazolyl, oxazolyl, isoxazolyl, thiazolyl, furyl, tetrahydrofuryl, thienyl, piperidinyl, piperazinyl, azepinyl, pyrimidinyl, pyridazinyl, tetrahydropyranyl, morpholinyl, dioxanyl, triazinyl and triazolyl. Preferred bicyclic heterocyclo groups include benzothiazolyl, benzoxazolyl, benzothienyl, quinolinyl, tetrahydroisoquinolinyl, benzimidazolyl, benzofuryl, indazolyl, benzisothiazolyl, isoindolinyl and tetrahydroquinolinyl. In more detailed embodiments heterocyclo groups may include indolyl, imidazolyl, furyl, thienyl, thiazolyl, pyrrolidyl, pyridyl and pyrimidyl.

[0085] “Substituted” refers to a group in which one or more hydrogen atoms are each independently replaced with the same or different substituent(s). Representative substituents include —X, —R⁶, —O—, ═O, —OR⁶, —SR⁶, —S—, ═S, —NR⁶R⁶, ═NR⁶, —CX₃, —CF₃, —CN, —OCN, —SCN, —NO, —NO₂, ═N₂, —N₃, —S(═O)₂₋₀—, —S(═O)₂OH, —S(═O)₂R⁶, —OS(═O)₂₋₀—, —OS(═O)₂OH, —OS(═O)₂R⁶, —P(═O)(O—)₂, —P(═O)(OH)(O—), —OP(═O)₂(O⁻), —C(—O)R⁶, —C(═S)R⁶, —C(═O)OR⁶, —C(═O)O—, —C(═S)OR⁶, —NR⁶—C(═O)—N(R⁶)₂, —NR⁶—C(═S)—N(R⁶)₂, and —C(═NR⁶)NR⁶R⁶, wherein each X is independently a halogen; and each R⁶ is independently hydrogen, halogen, alkyl, aryl, arylalkyl, arylaryl, arylheteroalkyl, heteroaryl, heteroarylalkyl, NR⁷R⁷, —C(═O)R⁷, and —S(═O)₂R⁷; and each R⁷ is independently hydrogen, alkyl, alkanyl, alkynyl, aryl, arylalkyl, arylheteralkyl, arylaryl, heteroaryl or heteroarylalkyl. Aryl containing substituents, whether or not having one or more substitutions, may be attached in a para (p-), meta (m-) or ortho (o-) conformation, or any combination thereof.

V-Erb Erythroblastic Leukemia Viral Oncogene (ERBB) and Exemplary dsRNA Molecules

[0086] In general, ERBB family proteins (EGFR, ERBB2, ERBB3 and ERBB4) share a common molecular structure that includes three distinct regions: an extracellular ligand-binding region, a single transmembrane region, and an intracellular tyrosine kinase domain that is flanked by a regulatory region (Burgess et al., Mol. Cell. 12:541, 2003). The extracellular region has two domains (L1 and L2) that recognize and bind ligand, and two cysteine-rich sub-domains (S1 and S2) that are involved in dimerization. The cytoplasmic region contains six tyrosine residues that are available for phosphorylation, an SH1 domain that has tyrosine kinase activity, and a juxtamembrane domain.

[0087] The epidermal growth factor receptor (erythroblastic leukemia viral (v-erb-b) oncogene homolog, avian) (EGFR; also known as ErbB, ErbB 1, mENA, human epidermal growth factor receptor-1, HER-1) has been found to be expressed in a variety of cancer tissues, including breast, head and neck, bladder, prostate, kidney, and non-small-cell lung cancer. Constitutive activation of EGFR associated with autocrine loops of growth factors is also observed in human tumors. For example, transforming growth factor-α (TGF-α) is frequently coexpressed with EGFR in non-small cell lung cancers (Seth et al., Br. J. Cancer 80:657, 1999), prostate cancer (Cai et al., Virchows Arch. 435:112, 1999), and gastrointestinal stromal tumors (Hsieh et al., 2000). In invasive breast carcinomas, coexpression of EGFR and TGF-α had a significant correlation with a worse patient prognosis (Umekita et al., Int. J. Cancer 89:484, 2000).

[0088] The v-erb-b2 erythroblastic leukemia viral oncogene homolog 2, neuro/glioblastoma derived oncogene homolog (ERBB2; also known as erbB-2, human epidermal growth factor receptor-2, HER-2, HER-2/neu, herstatin, NEU, NGL, TKR1, c-erb B2, c-erb B2/neu protein, neuroblastoma/glioblastoma derived oncogene homolog, tyrosine kinase-type cell surface receptor) currently has no known ligand, but likely interacts as a heterodimerization partner with other EGFR family members that do have ligands (Citri et al., Exp. Cell Res. 284:54, 2003; Yarden, Oncology 61(Suppl 2):1, 2001). ERBB2 is overexpressed in various cancers, including breast, lung, pancreatic, colon, esophageal, endometrial, and cervical cancers. ERBB2 is also known to be involved in intracellular signal transduction and intracellular trafficking (e.g., to the nucleus), and may play a role in non-cancer diseases such as schizophrenia, chronic renal disease, hypertension, and the cellular entry of certain infectious pathogens (Linggi and Carpenter, Trends Cell Biol. 16:649, 2006).

[0089] The v-erb-b2 erythroblastic leukemia viral oncogene homolog 3 (also known as ERBB3, human epidermal growth factor receptor-3, HER-3, tyrosine kinase-type cell surface receptor HER3, HER3, ErbB-3; c-erbB3; erbB3-S; MDA-BF-1; MGC88033; c-erbB-3; p180-ErbB3; p45-sErbB3; p85-sErbB3), has no apparent intrinsic tyrosine kinase activity, but does interact with other ERBB family members, which may be considered ERBB3 co-receptors for efficient intracellular signal transduction resulting in cell proliferation associated with cancer (e.g., breast cancer). ERBB3 can dimerize with ERBB2 to form a high affinity receptor for NRG-1 (also known as heregulin) and interruption of the consequent intracellular signal transduction pathway may have therapeutic potential in, for example, lung cancer (Gollamudi et al., Lung Cancer 43:135, 2004). A human breast cancer tumor tissue microarray revealed an association between ERBB3 expression and metastasis (independent of tumor size), which indicates that ERBB3-dependent signaling through ERBB3/ERBB2 heterodimers can contribute to metastasis by enhancing tumor cell invasion and intravasation in vivo (Xue et al., Cancer Res. 66:1418, 2006).

[0090] The v-erb-a erythroblastic leukemia viral oncogene homolog 4 (avian) (ERBB4; also known as ERbB4, human epidermal growth factor receptor-1, HER-4, MGC138404, p180erbB4) is a protein tyrosine kinase receptor for NDF/heregulin that regulates cell proliferation and differentiation. ErbB4 not bound to ligand adopts a tethered conformation similar to that observed for inactive forms of ErbB1 and ErbB3, indicating that it requires active ligand binding to promote dimer formation. ERBB4 expression is strongest in the epithelial lining of the gastrointestinal, urinary, reproductive, and respiratory tracts, as well as in skin, skeletal muscle, circulatory, endocrine, and nervous systems.

[0091] More detail regarding the ERBB family (EGFR, ERBB2, ERBB3, ERBB4), along with any related disorders are described at the Online Mendelian Inheritance in Man database at www.ncbi.nlm.nih.gov/entrez/query.fcgi?db=OMIM (OMIM Accession Nos. 131550, 164870, 190151, and 600543, respectively). The complete human EGFR variant 1, EGFR variant 2, EGFR variant 3, EGFR variant 4, ERBB2 variant 1, ERBB2 variant 2, ERBB3 variant 1, ERBB3 variant s, and ERBB4 mRNA sequences have GenBank accession numbers NM_{—}005228.3 (SEQ ID NO:1158), NM_{—}201282.1 (SEQ ID NO:1159), NM_{—}201283.1 (SEQ ID NO:1160), NM_{—}201284.1 (SEQ ID NO:1161), NM_{—}004448.2 (SEQ ID NO:77), NM_{—}001005862.1 (SEQ ID NO:78), NM_{—}001982.2 (SEQ ID NO:79), NM_{—}001005915.1 (SEQ ID NO:80), and NM_{—}005235.2 (SEQ ID NO:81), respectively. As used herein, reference to EGFR, ERBB2, ERBB3, and ERBB4 mRNAs or RNA sequences or sense strands means an RNA encompassed by SEQ ID NOS:1158-1161, 1803, 1804, 2543, 2544, and 3121, respectively, as well as variants, isoforms, and homologs having at least 80% or more identity with human EGFR, ERBB2, ERBB3, or ERBB4 sequence as set forth in SEQ ID NOS:1158-1161, 1803, 1804, 2543, 2544, or 3121, respectively.

[0092] The “percent identity” between two or more nucleic acid sequences is a function of the number of identical positions shared by the sequences (i.e., % identity=number of identical positions/total number of positions×100), taking into account the number of gaps, and the length of each gap that needs to be introduced to optimize alignment of two or more sequences. The comparison of sequences and determination of percent identity between two or more sequences can be accomplished using a mathematical algorithm, such as BLAST and Gapped BLAST programs at their default parameters (e.g., BLASTN, see www.ncbi.nlm.nih.gov/BLAST; see also Altschul et al., J. Mol. Biol. 215:403-410, 1990).

[0093] In one aspect, the instant disclosure provides an mdRNA molecule, comprising a first strand that is complementary to ERBB mRNA as set forth in any one of SEQ ID NOS:1158-1161, 1803, 1804, 2543, 2544, and 3121, and a second strand and a third strand that are each complementary to non-overlapping regions of the first strand, wherein the second strand and third strands can anneal with the first strand to form at least two double-stranded regions spaced apart by up to 10 nucleotides and thereby forming a gap between the second and third strands, and wherein (a) the mdRNA molecule optionally includes at least one double-stranded region of about 5 to 13 base pairs, or (b) wherein the combined double-stranded regions total about 15 to about 40 base pairs and the mdRNA molecule optionally has blunt ends; wherein at least one pyrimidine of the mdRNA has a pyrimidine nucleoside according to Formula I or II:

[chemical structure]

wherein R¹ and R² are each independently a —H, —OH, —OCH₃, —OCH₂OCH₂CH₃, —OCH₂CH₂OCH₃, halogen, substituted or unsubstituted C₁-C₁₀ alkyl, alkoxy, alkoxyalkyl, hydroxyalkyl, carboxyalkyl, alkylsulfonylamino, aminoalkyl, dialkylamino, alkylaminoalkyl, dialkylaminoalkyl, haloalkyl, trifluoromethyl, cycloalkyl, (cycloalkyl)alkyl, substituted or unsubstituted C₂-C₁₀ alkenyl, substituted or unsubstituted —O-allyl, —O—CH₂CH═CH₂, —O—CH═CHCH₃, substituted or unsubstituted C₂-C₁₀ alkynyl, carbamoyl, carbamyl, carboxy, carbonylamino, substituted or unsubstituted aryl, substituted or unsubstituted aralkyl, —NH₂, —NO₂, —C≡N, or heterocyclo group; R³ and R⁴ are each independently a hydroxyl, a protected hydroxyl, a phosphate, or an internucleoside linking group; and R⁵ and R⁸ are each independently O or S. In certain embodiments, at least one nucleoside is according to Formula I in which R¹ is methyl and R² is —OH, or R¹ is methyl, R² is —OH, and R⁸ is S. In other embodiments, the internucleoside linking group covalently links from about 5 to about 40 nucleosides. In some embodiments, the gap comprises at least one unpaired nucleotide in the first strand positioned between the double-stranded regions formed by the second and third strands when annealed to the first strand, or the gap is a nick. In certain embodiments, the nick or gap is located 10 nucleotides from the 5′-end of the first (antisense) strand or at the Argonaute cleavage site. In another embodiment, the meroduplex nick or gap is positioned such that the thermal stability is maximized for the first and second strand duplex and for the first and third strand duplex as compared to the thermal stability of such meroduplexes having a nick or gap in a different position.

[0094] In still another aspect, the instant disclosure provides an mdRNA molecule, comprising a first strand that is complementary to v-Erb erythroblastic leukemia viral oncogene (ERBB) mRNA as set forth in any one of SEQ ID NOS:1158-1161, 1803, 1804, 2543, 2544, and 3121, and a second strand and a third strand that are each complementary to non-overlapping regions of the first strand, wherein the second strand and third strands can anneal with the first strand to form at least two double-stranded regions spaced apart by up to 10 nucleotides and thereby forming a gap between the second and third strands, and wherein the mdRNA molecule optionally includes at least one double-stranded region of 5 base pairs to 13 base pairs. In a further aspect, the instant disclosure provides an mdRNA molecule having a first strand that is complementary to an ERBB mRNA as set forth in any one of SEQ ID NOS:1158-1161, 1803, 1804, 2543, 2544, and 3121, and a second strand and a third strand that are each complementary to non-overlapping regions of the first strand, wherein the second strand and third strands can anneal with the first strand to form at least two double-stranded regions spaced apart by up to 10 nucleotides and thereby forming a gap between the second and third strands, and wherein the combined double-stranded regions total about 15 base pairs to about 40 base pairs and the mdRNA molecule optionally has blunt ends. In some embodiments, the gap comprises at least one unpaired nucleotide in the first strand positioned between the double-stranded regions formed by the second and third strands when annealed to the first strand, or the gap is a nick. In certain embodiments, the nick or gap is located 10 nucleotides from the 5′-end of the first (antisense) strand or at the Argonaute cleavage site. In another embodiment, the meroduplex nick or gap is positioned such that the thermal stability is maximized for the first and second strand duplex and for the first and third strand duplex as compared to the thermal stability of such meroduplexes having a nick or gap in a different position.

[0095] As provided herein, any of the aspects or embodiments disclosed herein would be useful in treating ERBB-associated diseases or disorders, such as cancer of one or more of the breast, bladder, prostate, kidney, lung, colon, oesophagus, endometrium, cervix, head and neck, non-small-cell lung, glioma, ovary, pancreas, and oral squamous cells

[0096] In some embodiments, the dsRNA comprises at least three strands in which the first strand comprises about 5 nucleotides to about 40 nucleotides, and the second and third strands include each, individually, about 5 nucleotides to about 20 nucleotides, wherein the combined length of the second and third strands is about 15 nucleotides to about 40 nucleotides. In other embodiments, the dsRNA comprises at least two strands in which the first strand comprises about 15 nucleotides to about 24 nucleotides or about 25 nucleotides to about 40 nucleotides. In yet other embodiments, the first strand comprises about 15 to about 24 nucleotides or about 25 nucleotides to about 40 nucleotides and is complementary to at least about 15, 16, 17, 18, 19, 20, 21, 22, 23, 24, 25, 26, 27, 28, 29, 30, 31, 32, 33, 34, 35, 36, 37, 38, 39, or 40 contiguous nucleotides of a human ERBB mRNA as set forth in any one of SEQ ID NOS:1158-1161, 1803, 1804, 2543, 2544, and 3121. In alternative embodiments, the first strand comprises about 15 to about 24 nucleotides or about 25 nucleotides to about 40 nucleotides and is at least about 70%, 75%, 80%, 85%, 90%, 95%, 96%, 97%, 98%, or 99% identical to a sequence that is complementary to at least about 15, 16, 17, 18, 19, 20, 21, 22, 23, 24, 25, 26, 27, 28, 29, 30, 31, 32, 33, 34, 35, 36, 37, 38, 39, or 40 contiguous nucleotides of a human ERBB mRNA as set forth in any one of SEQ ID NOS:1158-1161, 1803, 1804, 2543, 2544, and 3121.

[0097] In further embodiments, the first strand will be complementary to a second strand or a second and third strand or to a plurality of strands. The first strand and its complements will be able to form dsRNA and mdRNA molecules of this disclosure, but only about 19 to about 25 nucleotides of the first strand comprise a sequence complementary to an ERBB mRNA. For example, a Dicer substrate dsRNA can have about 25 nucleotides to about 40 nucleotides, but with only 19 nucleotides of the antisense (first) strand being complementary to an ERBB mRNA. In further embodiments, the first strand having complementarity to an ERBB mRNA in about 19 nucleotides to about 25 nucleotides will have one, two, or three mismatches with an ERBB mRNA, such as a sequence set forth in any one of SEQ ID NOS:1158-1161, 1803, 1804, 2543, 2544, and 3121, or the first strand of 19 nucleotides to about 25 nucleotides, that for example activates or is capable of loading into RISC, will have at least 80% identity with the corresponding nucleotides found in an ERBB mRNA, such as the sequence set forth in any one of SEQ ID NOS:1158-1161, 1803, 1804, 2543, 2544, and 3121.

[0098] Certain illustrative dsRNA molecules, which can be used to design mdRNA molecules and can optionally include substitutions or modifications as described herein are provided in the Sequence Listing as attached herewith (text file named “07-R013PCT_Sequence_Listing,” created Feb. 20, 2008 and having a size of 1,033 kilobytes), which is herein incorporated by reference. In addition, the content of Table B disclosed in U.S. Provisional Patent Application No. 60/934,930 (filed Mar. 16, 2007), which was submitted with that application as a separate text file named “Table_B_Human_RefSeq_Accession_Numbers.txt” (created Mar. 16, 2007 and having a size of 3,604 kilobytes), is herein incorporated by reference in its entirety.

Substituting and Modifying ERBB dsRNA Molecules

[0099] The introduction of substituted and modified nucleotides into mdRNA and dsRNA molecules of this disclosure provides a powerful tool in overcoming potential limitations of in vivo stability and bioavailability inherent to native RNA molecules (i.e., having standard nucleotides) that are exogenously delivered. For example, the use of dsRNA molecules of this disclosure can enable a lower dose of a particular nucleic acid molecule for a given therapeutic effect (e.g., reducing or silencing ERBB expression) since dsRNA molecules of this disclosure tend to have a longer half-life in serum. Furthermore, certain substitutions and modifications can improve the bioavailability of dsRNA by targeting particular cells or tissues or improving cellular uptake of the dsRNA molecules. Therefore, even if the activity of a dsRNA molecule of this disclosure is reduced as compared to a native RNA molecule, the overall activity of the substituted or modified dsRNA molecule can be greater than that of the native RNA molecule due to improved stability or delivery of the molecule. Unlike native unmodified dsRNA, substituted and modified dsRNA can also minimize the possibility of activating the interferon response in, for example, humans.

[0100] In certain embodiments, a dsRNA molecule of this disclosure has at least one uridine, at least three uridines, or each and every uridine (i.e., all uridines) of the first (antisense) strand of the dsRNA substituted or replaced with 5-methyluridine or 2-thioribothymidine. In a related embodiment, the dsRNA molecule or analog thereof of this disclosure has at least one uridine, at least three uridines, or each and every uridine of the second (sense) strand of the dsRNA substituted or replaced with 5-methyluridine or 2-thioribothymidine. In a related embodiment, the dsRNA molecule or analog thereof of this disclosure has at least one uridine, at least three uridines, or each and every uridine of the third (sense) strand of the dsRNA substituted or replaced with 5-methyluridine or 2-thioribothymidine. In still another embodiment, the dsRNA molecule or analog thereof of this disclosure has at least one uridine, at least three uridines, or each and every uridine of both the first (antisense) and second (sense) strands; of both the first (antisense) and third (sense) strands; of both the second (sense) and third (sense) strands; or of all of the first (antisense), second (sense) and third (sense) strands of the dsRNA substituted or replaced with 5-methyluridine or 2-thioribothymidine. In some embodiments, the double-stranded region of a dsRNA molecule has at least three 5-methyluridines or 2-thioribothymidines. In certain embodiments, dsRNA molecules comprise ribonucleotides at about 5% to about 95% of the nucleotide positions in one strand, both strands, or any combination thereof.

[0101] In further embodiments, a dsRNA molecule that decreases expression of an ERBB gene by RNAi according to the instant disclosure further comprises one or more natural or synthetic non-standard nucleoside. In related embodiments, the non-standard nucleoside is one or more deoxyuridine, locked nucleic acid (LNA) molecule, a modified base (e.g., 5-methyluridine), a universal-binding nucleotide, a 2′-O-methyl nucleotide, a modified internucleoside linkage (e.g., phosphorothioate), a G clamp, or any combination thereof. In certain embodiments, the universal-binding nucleotide can be C-phenyl, C-naphthyl, inosine, azole carboxamide, 1-β-D-ribofuranosyl-4-nitroindole, 1-β-D-ribofuranosyl-5-nitroindole, 1-β-D-ribofuranosyl-6-nitroindole, or 1-β-D-ribofuranosyl-3-nitropyrrole.

[0102] Substituted or modified nucleotides present in dsRNA molecules, preferably in the sense or antisense strand, but also optionally in both the antisense and sense strands, comprise modified or substituted nucleotides according to this disclosure having properties or characteristics similar to natural or standard ribonucleotides. For example, this disclosure features dsRNA molecules including nucleotides having a Northern conformation (e.g., Northern pseudorotation cycle; see, e.g., Saenger, Principles of Nucleic Acid Structure, Springer-Verlag ed., 1984). As such, chemically modified nucleotides present in dsRNA molecules of this disclosure, preferably in the antisense strand, but also optionally in the sense or both the antisense and sense strands, are resistant to nuclease degradation while at the same time maintaining the capacity to mediate RNAi. Exemplary nucleotides having a Northern configuration include locked nucleic acid (LNA) nucleotides (e.g., 2′-O, 4′-C-methylene-(D-ribofuranosyl)nucleotides), 2′-methoxyethyl (MOE) nucleotides, 2′-methyl-thio-ethyl, 2′-deoxy-2′-fluoro nucleotides, 2′-deoxy-2′-chloro nucleotides, 2′-azido nucleotides, 5-methyluridines, or 2′-O-methyl nucleotides. In certain embodiments, the LNA is a 5-methyluridine LNA or 2-thio-5-methyluridine LNA. In any of these embodiments, one or more substituted or modified nucleotides can be a G clamp (e.g., a cytosine analog that forms an additional hydrogen bond to guanine, such as 9-(aminoethoxy)phenoxazine; see, e.g., Lin and Mateucci, J. Am. Chem. Soc. 120:8531, 1998).

[0103] As described herein, the first and one or more second strands of a dsRNA molecule or analog thereof provided by this disclosure can anneal or hybridize together (i.e., due to complementarity between the strands) to form at least one double-stranded region having a length of about 4 to about 10 base pairs, about 5 to about 13 base pairs, or about 15 to about 40 base pairs. In some embodiments, the dsRNA has at least one double-stranded region ranging in length from about 15 to about 24 base pairs or about 19 to about 23 base pairs. In other embodiments, the dsRNA has at least one double-stranded region ranging in length from about 26 to about 40 base pairs or about 27 to about 30 base pairs or about 30 to about 35 base pairs. In other embodiments, the two or more strands of a dsRNA molecule of this disclosure may optionally be covalently linked together by nucleotide or non-nucleotide linker molecules.

[0104] In certain embodiments, the dsRNA molecule or analog thereof comprises an overhang of one to four nucleotides on one or both 3′-ends of the dsRNA, such as an overhang comprising a deoxyribonucleotide or two deoxyribonucleotides (e.g., thymidine, adenine). In certain embodiments, the 3′-end comprising one or more deoxyribonucleotide is in an mdRNA molecule and is either in the gap, not in the gap, or any combination thereof. In some embodiments, dsRNA molecules or analogs thereof have a blunt end at one or both ends of the dsRNA. In certain embodiments, the 5′-end of the first or second strand is phosphorylated. In any of the embodiments of dsRNA molecules described herein, the 3′-terminal nucleotide overhangs can comprise ribonucleotides or deoxyribonucleotides that are chemically-modified at a nucleic acid sugar, base, or backbone. In any of the embodiments of dsRNA molecules described herein, the 3′-terminal nucleotide overhangs can comprise one or more universal base ribonucleotides. In any of the embodiments of dsRNA molecules described herein, the 3′-terminal nucleotide overhangs can comprise one or more acyclic nucleotides. In any of the embodiments of dsRNA molecules described herein, the dsRNA can further comprise a terminal phosphate group, such as a 5′-phosphate (see Martinez et al., Cell 110:563-574, 2002; and Schwarz et al., Molec. Cell 10:537-568, 2002) or a 5′,3′-diphosphate.

[0105] As set forth herein, the terminal structure of dsRNAs of this disclosure that decrease expression of an ERBB (e.g., EGFR, ERBB2, ERBB3, ERBB4) gene by, for example, RNAi may either have blunt ends or one or more overhangs. In certain embodiments, the overhang may be at the 3′-end or the 5′-end. The total length of dsRNAs having overhangs is expressed as the sum of the length of the paired double-stranded portion together with the overhanging nucleotides. For example, if a 19 base pair dsRNA has a two nucleotide overhang at both ends, the total length is expressed as 21-mer. Furthermore, since the overhanging sequence may have low specificity to an ERBB gene, it is not necessarily complementary (antisense) or identical (sense) to an ERBB gene sequence. In further embodiments, a dsRNA of this disclosure that decreases expression of an ERBB gene by RNAi may further comprise a low molecular weight structure (e.g., a natural RNA molecule such as a tRNA, rRNA or viral RNA, or an artificial RNA molecule) at, for example, one or more overhanging portion of the dsRNA.

[0106] In further embodiments, a dsRNA molecule that decreases expression of an ERBB gene by RNAi according to the instant disclosure further comprises a 2′-sugar substitution, such as 2′-deoxy, 2′-O-methyl, 2′-O-methoxyethyl, 2′-O-2-methoxyethyl, halogen, 2′-fluoro, 2′-O-allyl, or the like, or any combination thereof. In still further embodiments, a dsRNA molecule that decreases expression of an ERBB gene by RNAi according to the instant disclosure further comprises a terminal cap substituent on one or both ends of the first strand or one or more second strands, such as an alkyl, abasic, deoxy abasic, glyceryl, dinucleotide, acyclic nucleotide, inverted deoxynucleotide moiety, or any combination thereof. In certain embodiments, at least one or two 5′-terminal ribonucleotides of the sense strand within the double-stranded region have a 2′-sugar substitution. In certain other embodiments, at least one or two 5′-terminal ribonucleotides of the antisense strand within the double-stranded region have a 2′-sugar substitution. In certain embodiments, at least one or two 5′-terminal ribonucleotides of the sense strand and the antisense strand within the double-stranded region have a 2′-sugar substitution.

[0107] In other embodiments, a dsRNA molecule that decreases expression of one or more target gene by RNAi according to the instant disclosure comprises one or more substitutions in the sugar backbone, including any combination of ribosyl, 2′-deoxyribosyl, a tetrofuranosyl (e.g., L-α-threofuranosyl), a hexopyranosyl (e.g., β-allopyranosyl, β-altropyranosyl, and ⊕-glucopyranosyl), a pentopyranosyl (e.g., β-ribopyranosyl, α-lyxopyranosyl, β-xylopyranosyl, and α-arabinopyranosyl), a carbocyclic (carbon only ring) analog, a pyranose, a furanose, a morpholino, or analogs or derivatives thereof.

[0108] In yet other embodiments, a dsRNA molecule that decreases expression of an ERBB gene (including a mRNA splice variant thereof) by RNAi according to the instant disclosure further comprises at least one modified internucleoside linkage, such as independently a phosphorothioate, chiral phosphorothioate, phosphorodithioate, phosphotriester, aminoalkylphosphotriester, methyl phosphonate, alkyl phosphonate, 3′-alkylene phosphonate, 5′-alkylene phosphonate, chiral phosphonate, phosphonoacetate, thiophosphonoacetate, phosphinate, phosphoramidate, 3′-amino phosphoramidate, aminoalkylphosphoramidate, thionophosphoramidate, thionoalkylphosphonate, thionoalkylphosphotriester, selenophosphate, boranophosphate linkage, or any combination thereof.

[0109] A modified internucleotide linkage, as described herein, can be present in one or more strands of a dsRNA molecule of this disclosure, for example, in the sense strand, the antisense strand, both strands, or a plurality of strands (e.g., in an mdRNA). The dsRNA molecules of this disclosure can comprise one or more modified internucleotide linkages at the 3′-end, the 5′-end, or both of the 3′- and 5′-ends of the second sense strand, the third sense strand, the antisense strand or any combination of the antisense strand and one or more of the sense strands. In one embodiment, a dsRNA molecule capable of decreasing expression of an ERBB gene (including a specific or selected mRNA splice variant thereof) by RNAi has one modified internucleotide linkage at the 3′-end, such as a phosphorothioate linkage. For example, this disclosure provides a dsRNA molecule capable of decreasing expression of an ERBB gene by RNAi having about 1 to about 8 or more phosphorothioate internucleotide linkages in one dsRNA strand. In yet another embodiment, this disclosure provides a dsRNA molecule capable of decreasing expression of an ERBB gene by RNAi having about 1 to about 8 or more phosphorothioate internucleotide linkages in the dsRNA strands. In other embodiments, an exemplary dsRNA molecule of this disclosure can comprise from about 1 to about 5 or more consecutive phosphorothioate internucleotide linkages at the 5′-end of the sense strand, the antisense strand, both strands, or a plurality of strands. In another example, an exemplary dsRNA molecule of this disclosure can comprise one or more pyrimidine phosphorothioate internucleotide linkages in the sense strand, the antisense strand, either strand, or a plurality of strands. In yet another example, an exemplary dsRNA molecule of this disclosure comprises one or more purine phosphorothioate internucleotide linkages in the sense strand, the antisense strand, either strand, or a plurality of strands.

[0110] Many exemplary modified nucleotide bases or analogs thereof useful in the dsRNA of the instant disclosure include 5-methylcytosine; 5-hydroxymethylcytosine; xanthine; hypoxanthine; 2-aminoadenine; 6-methyl, 2-propyl, or other alkyl derivatives of adenine and guanine; 8-substituted adenines and guanines (such as 8-aza, 8-halo, 8-amino, 8-thiol, 8-thioalkyl, 8-hydroxyl, or the like); 7-methyl, 7-deaza, and 3-deaza adenines and guanines; 2-thiouracil; 2-thiothymine; 2-thiocytosine; 5-methyl, 5-propynyl, 5-halo (such as 5-bromo or 5-fluoro), 5-trifluoromethyl, or other 5-substituted uracils and cytosines; and 6-azouracil. Further useful nucleotide bases can be found in Kurreck, Eur. J. Biochem. 270:1628, 2003; Herdewijn, Antisense Nucleic Acid Develop. 10:297, 2000; Concise Encyclopedia of Polymer Science and Engineering, pages 858-859, Kroschwitz, J. I., ed. John Wiley & Sons, 1990; U.S. Pat. No. 3,687,808, and similar references.

[0111] Certain nucleotide base moieties are particularly useful for increasing the binding affinity of the dsRNA molecules of this disclosure to complementary targets. These include 5-substituted pyrimidines; 6-azapyrimidines; and N-2, N-6, or O-6 substituted purines (including 2-aminopropyladenine, 5-propynyluracil and 5-propynylcytosine). For example, 5-methyluridine and 5-methylcytosine substitutions are known to increase nucleic acid duplex stability, which can be combined with 2′-sugar modifications (such as 2′-methoxy or 2′-methoxyethyl) or internucleoside linkages (e.g., phosphorothioate) that provide nuclease resistance to the modified or substituted dsRNA.

[0112] In another aspect of the instant disclosure, there is provided a dsRNA that decreases expression of an ERBB gene, comprising a first strand that is complementary to an ERBB mRNA set forth in any one of SEQ ID NOS:1158-1161, 1803, 1804, 2543, 2544, and 3121 and a second strand that is complementary to the first strand, wherein the first and second strands form a double-stranded region of about 15 to about 40 base pairs; wherein at least one pyrimidine of the dsRNA is substituted with a pyrimidine nucleoside according to Formula I or II:

[chemical structure]

wherein R¹ and R² are each independently a —H, —OH, —OCH₃, —OCH₂OCH₂CH₃, —OCH₂CH₂OCH₃, halogen, substituted or unsubstituted C₁-C₁₀ alkyl, alkoxy, alkoxyalkyl, hydroxyalkyl, carboxyalkyl, alkylsulfonylamino, aminoalkyl, dialkylamino, alkylaminoalkyl, dialkylaminoalkyl, haloalkyl, trifluoromethyl, cycloalkyl, (cycloalkyl)alkyl, substituted or unsubstituted C₂-C₁₀ alkenyl, substituted or unsubstituted —O-allyl, —O—CH₂CH═CH₂, —O—CH═CHCH₃, substituted or unsubstituted C₂-C₁₀ alkynyl, carbamoyl, carbamyl, carboxy, carbonylamino, substituted or unsubstituted aryl, substituted or unsubstituted aralkyl, —NH₂, —NO₂, —C≡N, or heterocyclo group; R³ and R⁴ are each independently a hydroxyl, a protected hydroxyl, or an internucleoside linking group; and R⁵ and R⁸ are each independently O or S. In certain embodiments, at least one nucleoside is according to Formula I in which R¹ is methyl and R² is —OH, or R¹ is methyl, R² is —OH, and R⁸ is S. In other embodiments, the internucleoside linking group covalently links from about 5 to about 40 nucleosides.

[0113] In certain embodiments, the first and one or more second strands of a dsRNA, which decreases expression of an ERBB gene by RNAi and has at least one pyrimidine substituted with a pyrimidine nucleoside according to Formula I or II, can anneal or hybridize together (i.e., due to complementarity between the strands) to form at least one double-stranded region having a length or a combined length of about 15 to about 40 base pairs. In some embodiments, the dsRNA has at least one double-stranded region ranging in length from about 4 base pairs to about 10 base pairs or about 5 to about 13 base pairs or about 15 to about 25 base pairs or about 19 to about 23 base pairs. In other embodiments, the dsRNA has at least one double-stranded region ranging in length from about 26 to about 40 base pairs or about 27 to about 30 base pairs or about 30 to about 35 base pairs. In certain embodiments, the dsRNA molecule or analog thereof has an overhang of one to four nucleotides on one or both 3′-ends, such as an overhang comprising a deoxyribonucleotide or two deoxyribonucleotides (e.g., thymidine). In some embodiments, dsRNA molecule or analog thereof has a blunt end at one or both ends of the dsRNA. In certain embodiments, the 5′-end of the first or second strand is phosphorylated.

[0114] In certain embodiments, at least one R¹ is a C₁-C₅ alkyl, such as methyl or ethyl. Within other exemplary embodiments of this disclosure, compounds of Formula I are a 5-alkyluridine (i.e., R¹ is alkyl, R² is —OH, and R³, R⁴, and R⁵ are as defined herein) or compounds of Formula II are a 5-alkylcytidine (i.e., R¹ is alkyl, R² is —OH, and R³, R⁴, and R⁵ are as defined herein). In related embodiments, the 5-alkyluridine is a 5-methyluridine (also referred to as ribothymidine or T^{r}—i.e., R¹ is methyl and R² is —OH), and the 5-alkylcytidine is a 5-methylcytidine. In other embodiments, at least one, at least three, or all uridines of the first strand of the dsRNA are replaced with 5-methyluridine, or at least one, at least three, or all uridines of the second strand of the dsRNA are replaced with 5-methyluridine, or any combination thereof (e.g., such changes are made on more than one strand). In certain embodiments, at least one pyrimidine nucleoside of Formula I or Formula II has an R⁵ that is S or R⁸ that is S.

[0115] In further embodiments, at least one pyrimidine nucleoside of the dsRNA is a locked nucleic acid (LNA) in the form of a bicyclic sugar, wherein R² is oxygen, and the 2′-O and 4′-C form an oxymethylene bridge on the same ribose ring. In a related embodiment, the LNA comprises a base substitution, such as a 5-methyluridine LNA or 2-thio-5-methyluridine LNA. In other embodiments, at least one, at least three, or all uridines of the first strand of the dsRNA are replaced with 5-methyluridine or 2-thioribothymidine or 5-methyluridine LNA or 2-thio-5-methyluridine LNA, or at least one, at least three, or all uridines of the second strand of the dsRNA are replaced with 5-methyluridine, 2-thioribothymidine, 5-methyluridine LNA, 2-thio-5-methyluridine LNA, or any combination thereof (e.g., such changes are made on both strands, or some substitutions include 5-methyluridine only, 2-thioribothymidine only, 5-methyluridine LNA only, 2-thio-5-methyluridine LNA only, or one or more 5-methyluridine or 2-thioribothymidine with one or more 5-methyluridine LNA or 2-thio-5-methyluridine LNA).

[0116] In further embodiments, a ribose of the pyrimidine nucleoside or the internucleoside linkage can be optionally modified. For example, compounds of Formula I or II are provided wherein R² is alkoxy, such as a 2′-O-methyl substitution (e.g., which may be in addition to a 5-alkyluridine or a 5-alkylcytidine, respectively). In certain embodiments, R² is selected from 2′-O—(C₁-C₅) alkyl, 2′-O-methyl, 2′-OCH₂OCH₂CH₃, 2′-OCH₂CH₂OCH₃, 2′-O-allyl, or 2′-fluoro. In further embodiments, one or more of the pyrimidine nucleosides are according to Formula I in which R¹ is methyl and R² is a 2′-O—(C₁-C₅) alkyl (e.g., 2′-O-methyl), or in which R¹ is methyl, R² is a 2′O—(C₁-C₅)alkyl (e.g., 2′O-methyl), and R² is S, or any combination thereof. In other embodiments, one or more, or at least two, pyrimidine nucleosides according to Formula I or II have an R² that is not —H or —OH and is incorporated at a 3′-end or 5′-end and not within the gap of one or more strands within the double-stranded region of the dsRNA molecule.

[0117] In further embodiments, a dsRNA molecule or analog thereof comprising a pyrimidine nucleoside according to Formula I or Formula II in which R² is not —H or —OH and an overhang, further comprises at least two of pyrimidine nucleosides that are incorporated either at a 3′-end or a 5′-end or both of one strand or two strands within the double-stranded region of the dsRNA molecule. In a related embodiment, at least one of the at least two pyrimidine nucleosides in which R² is not —H or —OH is located at a 3′-end or a 5′-end within the double-stranded region of at least one strand of the dsRNA molecule, and wherein at least one of the at least two pyrimidine nucleosides in which R² is not —H or —OH is located internally within a strand of the dsRNA molecule. In still further embodiments, a dsRNA molecule or analog thereof that has an overhang has a first of the two or more pyrimidine nucleosides in which R² is not —H or —OH that is incorporated at a 5′-end within the double-stranded region of the sense strand of the dsRNA molecule and a second of the two or more pyrimidine nucleosides is incorporated at a 5′-end within the double-stranded region of the antisense strand of the dsRNA molecule. In any of these embodiments, one or more substituted or modified nucleotides can be a G clamp (e.g., a cytosine analog that forms an additional hydrogen bond to guanine, such as 9-(aminoethoxy)phenoxazine; see, e.g., Lin and Mateucci, 1998). In any of these embodiments, provided the one or more pyrimidine nucleosides are not within the gap.

[0118] In yet other embodiments, a dsRNA molecule or analog thereof of Formula I or II according to the instant disclosure that has an overhang that comprises four or more independent pyrimidine nucleosides or four or more independent pyrimidine nucleosides in which R² is not —H or —OH, wherein (a) a first pyrimidine nucleoside is incorporated into a 3′-end within the double-stranded region of the sense (second) strand of the dsRNA, (b) a second pyrimidine nucleoside is incorporated into a 5′-end within the double-stranded region of the sense (second) strand, (c) a third pyrimidine nucleoside is incorporated into a 3′-end within the double-stranded region of the antisense (first) strand of the dsRNA, and (d) a fourth pyrimidine nucleoside is incorporated into a 5′-end within the double-stranded region of the antisense (first) strand. In any of these embodiments, provided the one or more pyrimidine nucleosides are not within the gap.

[0119] In further embodiments, a dsRNA molecule or analog thereof comprising a pyrimidine nucleoside according to Formula I or Formula II in which R² is not —H or —OH and is blunt-ended, further comprises at least two of pyrimidine nucleosides that are incorporated either at a 3′-end or a 5′-end or both of one strand or two strands of the dsRNA molecule. In a related embodiment, at least one of the at least two pyrimidine nucleosides in which R² is not —H or —OH is located at a 3′-end or a 5′-end of at least one strand of the dsRNA molecule, and wherein at least one of the at least two pyrimidine nucleosides in which R² is not —H or —OH is located internally within a strand of the dsRNA molecule. In still further embodiments, a dsRNA molecule or analog thereof that is blunt-ended has a first of the two or more pyrimidine nucleosides in which R² is not —H or —OH that is incorporated at a 5′-end of the sense strand of the dsRNA molecule and a second of the two or more pyrimidine nucleosides is incorporated at a 5′-end of the antisense strand of the dsRNA molecule. In any of these embodiments, provided the one or more pyrimidine nucleosides are not within the gap.

[0120] In yet other embodiments, a dsRNA molecule comprising a pyrimidine nucleoside according to Formula I or Formula II and that is blunt-ended comprises four or more independent pyrimidine nucleosides or four or more independent pyrimidine nucleosides in which R² is not —H or —OH, wherein (a) a first pyrimidine nucleoside is incorporated into a 3′-end within the double-stranded region of the sense (second) strand of the dsRNA, (b) a second pyrimidine nucleoside is incorporated into a 5′-end within the double-stranded region of the sense (second) strand, (c) a third pyrimidine nucleoside is incorporated into a 3′-end within the double-stranded region of the antisense (first) strand of the dsRNA, and (d) a fourth pyrimidine nucleoside is incorporated into a 5′-end within the double-stranded region of the antisense (first) strand. In any of these embodiments, provided the one or more pyrimidine nucleosides are not within the gap.

[0121] In still further embodiments, a dsRNA molecule or analog thereof of Formula I or II according to the instant disclosure further comprises a terminal cap substituent on one or both ends of the first strand or second strand, such as an alkyl, abasic, deoxy abasic, glyceryl, dinucleotide, acyclic nucleotide, inverted deoxynucleotide moiety, or any combination thereof. In further embodiments, one or more internucleoside linkage can be optionally modified. For example, a dsRNA molecule or analog thereof of Formula I or II according to the instant disclosure wherein at least one internucleoside linkage is modified to a phosphorothioate, chiral phosphorothioate, phosphorodithioate, phosphotriester, aminoalkylphosphotriester, methyl phosphonate, alkyl phosphonate, 3′-alkylene phosphonate, 5′-alkylene phosphonate, chiral phosphonate, phosphonoacetate, thiophosphonoacetate, phosphinate, phosphoramidate, 3′-amino phosphoramidate, aminoalkylphosphoramidate, thionophosphoramidate, thionoalkylphosphonate, thionoalkylphosphotriester, selenophosphate, boranophosphate linkage, or any combination thereof.

[0122] In still another embodiment, a nicked or gapped dsRNA molecule (ndsRNA or gdsRNA, respectively) that decreases expression of an ERBB gene by RNAi, comprising a first strand that is complementary to an ERBB mRNA set forth in any one of SEQ ID NOS:1158-1161, 1803, 1804, 2543, 2544, and 3121 and two or more second strands that are complementary to the first strand, wherein the first and at least one of the second strands form a non-overlapping double-stranded region of about 5 to about 13 base pairs. Any of the substitutions or modifications described herein is contemplated within this embodiment as well.

[0123] In another exemplary of this disclosure, the dsRNAs comprise at least two or more substituted pyrimidine nucleosides can each be independently selected wherein R¹ comprises any chemical modification or substitution as contemplated herein, for example an alkyl (e.g., methyl), halogen, hydroxy, alkoxy, nitro, amino, trifluoromethyl, cycloalkyl, (cycloalkyl)alkyl, alkanoyl, alkanoyloxy, aryl, aroyl, aralkyl, nitrile, dialkylamino, alkenyl, alkynyl, hydroxyalkyl, aminoalkyl, alkylaminoalkyl, dialkylaminoalkyl, haloalkyl, carboxyalkyl, alkoxyalkyl, carboxy, carbonyl, alkanoylamino, carbamoyl, carbonylamino, alkylsulfonylamino, or heterocyclo group. When two or more modified ribonucleotides are present, each modified ribonucleotide can be independently modified to have the same, or different, modification or substitution at R¹ or R².

[0124] In other detailed embodiments, one or more substituted pyrimidine nucleosides according to Formula I or II can be located at any ribonucleotide position, or any combination of ribonucleotide positions, on either or both of the sense and antisense strands of a dsRNA molecule of this disclosure, including at one or more multiple terminal positions as noted above, or at any one or combination of multiple non-terminal (“internal”) positions. In this regard, each of the sense and antisense strands can incorporate about 1 to about 6 or more of the substituted pyrimidine nucleosides.

[0125] In certain embodiments, when two or more substituted pyrimidine nucleosides are incorporated within a dsRNA of this disclosure, at least one of the substituted pyrimidine nucleosides will be at a 3′- or 5′-end of one or both strands, and in certain embodiments at least one of the substituted pyrimidine nucleosides will be at a 5′-end of one or both strands. In other embodiments, the substituted pyrimidine nucleosides are located at a position corresponding to a position of a pyrimidine in an unmodified dsRNA that is constructed as a homologous sequence for targeting a cognate mRNA, as described herein.

[0126] In addition, the terminal structure of the dsRNAs of this disclosure may have a stem-loop structure in which ends of one side of the dsRNA molecule are connected by a linker nucleic acid, e.g., a linker RNA. The length of the double-stranded region (stem-loop portion) can be, for example, about 15 to about 49 bp, about 15 to about 35 bp, or about 21 to about 30 bp long. Alternatively, the length of the double-stranded region that is a final transcription product of dsRNAs to be expressed in a target cell may be, for example, approximately about 15 to about 49 bp, about 15 to about 35 bp, or about 21 to about 30 bp long. When linker segments are employed, there is no particular limitation in the length of the linker as long as it does not hinder pairing of the stem portion. For example, for stable pairing of the stem portion and suppression of recombination between DNAs coding for this portion, the linker portion may have a clover-leaf tRNA structure. Even if the linker has a length that would hinder pairing of the stem portion, it is possible, for example, to construct the linker portion to include introns so that the introns are excised during processing of a precursor RNA into mature RNA, thereby allowing pairing of the stem portion. In the case of a stem-loop dsRNA, either end (head or tail) of RNA with no loop structure may have a low molecular weight RNA. As described above, these low molecular weight RNAs may include a natural RNA molecule, such as tRNA, rRNA or viral RNA, or an artificial RNA molecule.

[0127] A dsRNA molecule may be comprised of a circular nucleic acid molecule, wherein the dsRNA is about 38 to about 70 nucleotides in length having from about 18 to about 23 base pairs (e.g., about 19 to about 21 bp) wherein the circular oligonucleotide forms a dumbbell shaped structure having about 19 base pairs and two loops. In certain embodiments, a circular dsRNA molecule contains two loop motifs wherein one or both loop portions of the dsRNA molecule is biodegradable. For example, a circular dsRNA molecule of this disclosure is designed such that degradation of the loop portions of the dsRNA molecule in vivo can generate a dsRNA molecule with 3′-terminal overhangs, such as 3′-terminal nucleotide overhangs comprising from about 1 to about 4 (unpaired) nucleotides.

[0128] Substituting or modifying nucleosides of a dsRNA according to this disclosure can result in increased resistance to enzymatic degradation, such as exonucleolytic degradation, including 5′-exonucleolytic or 3′-exonucleolytic degradation. As such, in some embodiments, the dsRNAs described herein will exhibit significant resistance to enzymatic degradation compared to a corresponding dsRNA having standard nucleotides, and will thereby possess greater stability, increased half-life, and greater bioavailability in physiological environments (e.g., when introduced into a eukaryotic target cell). In addition to increasing resistance of the substituted or modified dsRNAs to exonucleolytic degradation, the incorporation of one or more pyrimidine nucleosides according to Formula I or II will render dsRNAs more resistant to other enzymatic or chemical degradation processes and thus more stable and bioavailable than otherwise identical dsRNAs that do not include the substitutions or modifications. In related aspects of this disclosure, dsRNA substitutions or modifications described herein will often improve stability of a modified dsRNA for use within research, diagnostic and treatment methods wherein the modified dsRNA is contacted with a biological sample, for example, a mammalian cell, intracellular compartment, serum or other extracellular fluid, tissue, or other in vitro or in vivo physiological compartment or environment. In one embodiment, diagnosis is performed on an isolated biological sample. In another embodiment, the diagnostic method is performed in vitro. In a further embodiment, the diagnostic method is not performed (directly) on a human or animal body.

[0129] In addition to increasing stability of substituted or modified dsRNAs, incorporation of one or more pyrimidine nucleosides according to Formula I or II in a dsRNA designed for gene silencing can provide additional desired functional results, including increasing a melting point of a substituted or modified dsRNA compared to a corresponding unmodified dsRNA. In another aspect of this disclosure, certain substitutions or modifications of dsRNAs described herein can reduce “off-target effects” of the substituted or modified dsRNA molecules when they are contacted with a biological sample (e.g., when introduced into a target eukaryotic cell having specific, and non-specific mRNA species present as potential specific and non-specific targets). In yet another aspect of this disclosure, the dsRNA substitutions or modifications described herein can reduce interferon activation by the dsRNA molecule when the dsRNA is contacted with a biological sample, e.g., when introduced into a eukaryotic cell.

[0130] In further embodiments, dsRNAs of this disclosure can comprise one or more sense (second) strand that is homologous or corresponds to a sequence of a target gene (e.g., an ERBB) and an antisense (first) strand that is complementary to the sense strand and a sequence of the target gene (e.g., an ERBB). In exemplary embodiments, at least one strand of the dsRNA incorporates one or more pyrimidines substituted according to Formula I or II (e.g., wherein the pyrimidine is a 5-methyluridine, 2-thioribothymidine, or 2-O-methyl-5-methylurindine, the ribose is modified to incorporate one or more 2′-O-methyl substitutions, or any combination thereof). These and other multiple substitutions or modifications according to Formula I or II can be introduced into one or more pyrimidines, or into any combination and up to all pyrimidines present in one or more strands of a dsRNA of the instant disclosure, so long as the dsRNA has or retains RNAi activity similar to or better than the activity of an unmodified dsRNA.

[0131] In any of the embodiments described herein, the dsRNA may include multiple modifications. For example, a dsRNA having at least one ribothymidine or 2′-O-methyl-5-methyluridine may further comprise at least one LNA, 2′-methoxy, 2′-fluoro, 2′-deoxy, phosphorothioate linkage, an inverted base terminal cap, or any combination thereof. In certain embodiments, a dsRNA will have from one to all ribothymidines and have up to 75% LNA. In other embodiments, a dsRNA will have from one to all ribothymidines and have up to 75% 2′-methoxy (e.g., not at the Argonaute cleavage site). In still other embodiments, a dsRNA will have from one to all ribothymidines and have up to 100% 2′-fluoro. In further embodiments, a dsRNA will have from one to all ribothymidines and have up to 75% 2′-deoxy. In further embodiments, a dsRNA will have up to 75% LNA and have up to 75% 2′-methoxy. In still other embodiments, a dsRNA will have up to 75% LNA and have up to 100% 2′-fluoro. In further embodiments, a dsRNA will have up to 75% LNA and have up to 75% 2′-deoxy. In other embodiments, a dsRNA will have up to 75% 2′-methoxy and have up to 100% 2′-fluoro. In more embodiments, a dsRNA will have up to 75% 2′-methoxy and have up to 75% 2′-deoxy. In further embodiments, a dsRNA will have up to 100% 2′-fluoro and have up to 75% 2′-deoxy.

[0132] In further multiple modification embodiments, a dsRNA will have from one to all ribothymidines, up to 75% LNA, and up to 75% 2′-methoxy. In still further embodiments, a dsRNA will have from one to all ribothymidines, up to 75% LNA, and up to 100% 2′-fluoro. In further embodiments, a dsRNA will have from one to all ribothymidines, up to 75% LNA, and up to about 75% 2′-deoxy. In further embodiments, a dsRNA will have from one to all ribothymidines, up to 75% 2′-methoxy, and up to 75% 2′-fluoro. In further embodiments, a dsRNA will have from one to all ribothymidines, up to 75% 2′-methoxy, and up to 75% 2′-deoxy. In further embodiments, a dsRNA will have from one to all ribothymidines, up to 100% 2′-fluoro, and up to 75% 2′-deoxy. In yet further embodiments, a dsRNA will have from one to all ribothymidines, up to 75% LNA substitutions, up to 75% 2′-methoxy, up to 100% 2′-fluoro, and up to 75% 2′-deoxy. In other embodiments, a dsRNA will have up to 75% LNA, up to 75% 2′-methoxy, and up to 100% 2′-fluoro. In further embodiments, a dsRNA will have up to 75% LNA, up to 75% 2′-methoxy, and up to about 75% 2′-deoxy. In further embodiments, a dsRNA will have up to 75% LNA, up to 100% 2′-fluoro, and up to 75% 2′-deoxy. In still further embodiments, a dsRNA will have up to 75% 2′-methoxy, up to 100% 2′-fluoro, and up to 75% 2′-deoxy.

[0133] In any of these exemplary methods for using multiply modified dsRNA, the dsRNA may further comprise up to 100% phosphorothioate internucleoside linkages, from one to ten or more inverted base terminal caps, or any combination thereof. Additionally, any of these dsRNA may have these multiple modifications on one strand, two strands, three strands, a plurality of strands, or all strands, or on the same or different nucleoside within a dsRNA molecule. Finally, in any of these multiple modification dsRNA, the dsRNA must have gene silencing activity.

[0134] Within certain aspects, the present disclosure provides dsRNA that decreases expression of an ERBB gene by RNAi (e.g., an ERBB of any one of SEQ ID NOS:1158-1161, 1803, 1804, 2543, 2544, and 3121), and compositions comprising one or more dsRNA, wherein at least one dsRNA comprises one or more universal-binding nucleotide(s) in the first, second or third position in the anti-codon of the antisense or sense strand of the dsRNA and wherein the dsRNA is capable of specifically binding to an ERBB sequence, such as an RNA expressed by a target cell. In cases wherein the sequence of a target ERBB RNA includes one or more single nucleotide substitutions, dsRNA comprising a universal-binding nucleotide retains its capacity to specifically bind a target ERBB RNA, thereby mediating gene silencing and, as a consequence, overcoming escape of the target ERBB from dsRNA-mediated gene silencing. Examplary universal-binding nucleotides that may be suitably employed in the compositions and methods disclosed herein include inosine, 1-O-D-ribofuranosyl-5-nitroindole, or 1-O-D-ribofuranosyl-3-nitropyrrole.

[0135] In certain aspects, dsRNA disclosed herein can include between about 1 universal-binding nucleotide and about 10 universal-binding nucleotides. Within other aspects, the presently disclosed dsRNA may comprise a sense strand that is homologous to a sequence of an ERBB gene and an antisense strand that is complementary to the sense strand, with the proviso that at least one nucleotide of the antisense or sense strand of the otherwise complementary dsRNA duplex has one or more universal-binding nucleotide.

### Synthesis of Nucleic Acid Molecules

[0136] Exemplary molecules of the instant disclosure are recombinantly produced, chemically synthesized, or a combination thereof. Oligonucleotides (e.g., certain modified oligonucleotides or portions of oligonucleotides lacking ribonucleotides) are synthesized using protocols known in the art, for example as described in Caruthers et al., Methods in Enzymol. 211:3, 1992; PCT Publication No. WO 99/54459, Wincott et al., Nucleic Acids Res. 23:2677, 1995; Wincott et al., Methods Mol. Bio. 74:59, 1997; Brennan et al., Biotechnol Bioeng. 61:33, 1998; and Brennan, U.S. Pat. No. 6,001,311. Synthesis of RNA, including certain dsRNA molecules and analogs thereof of this disclosure, can be made using the procedure as described in Usman et al., J. Am. Chem. Soc. 109:7845, 1987; Scaringe et al., Nucleic Acids Res. 18:5433, 1990; and Wincott et al., Nucleic Acids Res. 23:2677-2684, 1995; Wincott et al., Methods Mol. Bio. 74:59, 1997.

[0137] In certain embodiments, the nucleic acid molecules of the present disclosure can be synthesized separately and joined together post-synthetically, for example, by ligation (Moore et al., Science 256:9923, 1992; PCT Publication No. WO 93/23569; Shabarova et al., Nucleic Acids Res. 19:4247, 1991; Bellon et al., Nucleosides & Nucleotides 16:951, 1997; Bellon et al., Bioconjugate Chem. 8:204, 1997), or by hybridization following synthesis or deprotection.

[0138] In further embodiments, dsRNAs of this disclosure that decrease expression of an ERBB gene by RNAi can be made as single or multiple transcription products expressed by a polynucleotide vector encoding one or more dsRNAs and directing their expression within host cells. In these embodiments the double-stranded portion of a final transcription product of the dsRNAs to be expressed within the target cell can be, for example, about 5 to about 40 bp, about 15 to about 24 bp, or about 25 to about 40 bp long. Within exemplary embodiments, double-stranded portions of dsRNAs, in which two or more strands pair up, are not limited to completely paired nucleotide segments, and may contain non-pairing portions due to a mismatch (the corresponding nucleotides are not complementary), bulge (lacking in the corresponding complementary nucleotide on one strand), overhang, or the like. Non-pairing portions can be contained to the extent that they do not interfere with dsRNA formation and function. In certain embodiments, a “bulge” may comprise 1 to 2 non-pairing nucleotides, and the double-stranded region of dsRNAs in which two strands pair up may contain from about 1 to 7, or about 1 to 5 bulges. In addition, “mismatch” portions contained in the double-stranded region of dsRNAs may include from about 1 to 7, or about 1 to 5 mismatches. In other embodiments, the double-stranded region of dsRNAs of this disclosure may contain both bulge and mismatched portions in the approximate numerical ranges specified herein.

[0139] A dsRNA or analog thereof of this disclosure may be further comprised of a nucleotide, non-nucleotide, or mixed nucleotide/non-nucleotide linker that joins the sense region of the dsRNA to the antisense region of the dsRNA. In one embodiment, a nucleotide linker can be a linker of more than about 2 nucleotides length up to about 10 nucleotides in length. In another embodiment, the nucleotide linker can be a nucleic acid aptamer. By “aptamer” or “nucleic acid aptamer” as used herein is meant a nucleic acid molecule that binds specifically to a target molecule wherein the nucleic acid molecule has sequence that comprises a sequence recognized by the target molecule in its natural setting. Alternately, an aptamer can be a nucleic acid molecule that binds to a target molecule wherein the target molecule does not naturally bind to a nucleic acid. The target molecule can be any molecule of interest. For example, the aptamer can be used to bind to a ligand-binding domain of a protein, thereby preventing interaction of the naturally occurring ligand with the protein. This is a non-limiting example and those in the art will recognize that other embodiments can be readily generated using techniques generally known in the art (see, e.g., Gold et al., Annu. Rev. Biochem. 64:763, 1995; Brody and Gold, J. Biotechnol. 74:5, 2000; Sun, Curr. Opin. Mol. Ther. 2:100, 2000; Kusser, J. Biotechnol. 74:27, 2000; Hermann and Patel, Science 287:820, 2000; and Jayasena, Clinical Chem. 45:1628, 1999).

[0140] A non-nucleotide linker may be comprised of an abasic nucleotide, polyether, polyamine, polyamide, peptide, carbohydrate, lipid, polyhydrocarbon, or other polymeric compounds (e.g., polyethylene glycols such as those having between 2 and 100 ethylene glycol units). Specific examples include those described by Seela and Kaiser, Nucleic Acids Res. 18:6353, 1990, and Nucleic Acids Res. 15:3113, 1987; Cload and Schepartz, J. Am. Chem. Soc. 113:6324, 1991; Richardson and Schepartz, J. Am. Chem. Soc. 113:5109, 1991; Ma et al., Nucleic Acids Res. 21:2585, 1993, and Biochemistry 32:1751, 1993; Durand et al., Nucleic Acids Res. 18:6353, 1990; McCurdy et al., Nucleosides & Nucleotides 10:287, 1991; Jaschke et al., Tetrahedron Lett. 34:301, 1993; Ono et al., Biochemistry 30:9914, 1991; Arnold et al., PCT Publication No. WO 89/02439; Usman et al., PCT Publication No. WO 95/06731; Dudycz et al., PCT Publication No. WO 95/11910 and Ferentz and Verdine, J. Am. Chem. Soc. 113:4000, 1991. The synthesis of a dsRNA molecule of this disclosure, which can be further modified, comprises: (a) synthesis of a first (antisense) strand and synthesis of a second (sense) strand and a third (sense) strand that are each complementary to non-overlapping regions of the first strand; and (b) annealing the first, second and third strands together under conditions suitable to obtain a dsRNA molecule. In another embodiment, synthesis of the first, second and thirdstrands of a dsRNA molecule is by solid phase oligonucleotide synthesis. In yet another embodiment, synthesis of the first, second, and third strands of a dsRNA molecule is by solid phase tandem oligonucleotide synthesis.

[0141] Chemically synthesizing nucleic acid molecules with substitutions or modifications (base, sugar, phosphate, or any combination thereof) can prevent their degradation by serum ribonucleases, which may lead to increased potency. See, e.g., Eckstein et al., PCT Publication No. WO 92/07065; Perrault et al., Nature 344:565, 1990; Pieken et al., Science 253:314, 1991; Usman and Cedergren, Trends in Biochem. Sci. 17:334, 1992; Usman et al., Nucleic Acids Symp. Ser. 31:163, 1994; Beigelman et al., J. Biol. Chem. 270:25702, 1995; Burgin et al., Biochemistry 35:14090, 1996; Burlina et al, Bioorg. Med. Chem. 5:1999, 1997; Thompson et al., Karpeisky et al., Tetrahedron Lett. 39:1131, 1998; Earnshaw and Gait, Biopolymers (Nucleic Acid Sciences) 48:39-55, 1998; Verma and Eckstein, Annu. Rev. Biochem. 67:99-134, 1998; Herdewijn, Antisense Nucleic Acid Drug Dev. 10:297, 2000; Kurreck, Eur. J. Biochem. 270:1628, 2003; Dorsett and Tuschl, Nature Rev. Drug Discov. 3:318, 2004; PCT Publication Nos. WO 91/03162; WO 93/15187; WO 97/26270; WO 98/13526; U.S. Pat. Nos. 5,334,711; 5,627,053; 5,716,824; 5,767,264; 6,300,074. Each of the above references discloses various substitutions and chemical modifications to the base, phosphate, or sugar moieties of nucleic acid molecules, which can be used in the dsRNAs described herein. For example, oligonucleotides can be modified at the sugar moiety to enhance stability or prolong biological activity by increasing nuclease resistance. Representative sugar modifications include 2′-amino, 2′-C-allyl, 2′-fluoro, 2′-O-methyl, 2′-O-allyl, or 2′-H. Other modifications to enhance stability or prolong biological activity can be internucleoside linkages, such as phosphorothioate, or base-modifications, such as locked nucleic acids (see, e.g., U.S. Pat. Nos. 6,670,461; 6,794,499; 6,268,490), or 5-methyluridine or 2′-O-methyl-5-methyluridine in place of uridine (see, e.g., U.S. Patent Application Publication No. 2006/0142230). Hence, dsRNA molecules of the instant disclosure can be modified to increase nuclease resistance or duplex stability while substantially retaining or having enhanced RNAi activity as compared to unmodified dsRNA.

[0142] In one embodiment, this disclosure features substituted or modified dsRNA molecules, such as phosphate backbone modifications comprising one or more phosphorothioate, phosphorodithioate, methylphosphonate, phosphotriester, morpholino, amidate carbamate, carboxymethyl, acetamidate, polyamide, sulfonate, sulfonamide, sulfamate, formacetal, thioformacetal, or alkylsilyl substitutions. For a review of oligonucleotide backbone modifications, see Hunziker and Leumann, Nucleic Acid Analogues: Synthesis and Properties, in Modern Synthetic Methods, VCH, 331-417, 1995; and Mesmaeker et al., ACS, 24-39, 1994.

[0143] In another embodiment, a conjugate molecule can be optionally attached to a dsRNA or analog thereof that decreases expression of an ERBB gene by RNAi. For example, such conjugate molecules may be polyethylene glycol, human serum albumin, polyarginine, Gln-Asn polymer, or a ligand for a cellular receptor that can, for example, mediate cellular uptake (e.g., HIV TAT, see Vocero-Akbani et al., Nature Med. 5:23, 1999; see also U.S. Patent Application Publication No. 2004/0132161). Examples of specific conjugate molecules contemplated by the instant disclosure that can be attached to a dsRNA or analog thereof of this disclosure are described in Vargeese et al., U.S. Patent Application Publication No. 2003/0130186, and U.S. Patent Application Publication No. 2004/0110296. In another embodiment, a conjugate molecule is covalently attached to a dsRNA or analog thereof that decreases expression of an ERBB gene by RNAi via a biodegradable linker. In certain embodiments, a conjugate molecule can be attached at the 3′-end of either the sense strand, the antisense strand, or both strands of a dsRNA molecule provided herein. In another embodiment, a conjugate molecule can be attached at the 5′-end of either the sense strand, the antisense strand, or both strands of the dsRNA or analog thereof. In yet another embodiment, a conjugate molecule is attached at both the 3′-end and 5′-end of either the sense strand, the antisense strand, or both strands of a dsRNA molecule, or any combination thereof. In further embodiments, a conjugate molecule of this disclosure comprises a molecule that facilitates delivery of a dsRNA or analog thereof into a biological system, such as a cell. A person of skill in the art can screen dsRNA of this disclosure having various conjugates to determine whether the dsRNA-conjugate possesses improved properties (e.g., pharmacokinetic profiles, bioavailability, stability) while maintaining the ability to mediate RNAi in, for example, an animal model as described herein or generally known in the art.

Methods for Selecting dsRNA Molecules Specific for ERBB

[0144] As indicated herein, the present disclosure also provides methods for selecting dsRNA and analogs thereof that are capable of specifically binding to an ERBB gene (including a mRNA splice variant thereof) while being incapable of specifically binding or minimally binding to non-ERBB genes. The selection process disclosed herein is useful, for example, in eliminating dsRNAs analogs that are cytotoxic due to non-specific binding to, and subsequent degradation of, one or more non-ERBB genes.

[0145] Methods of the present disclosure do not require a priori knowledge of the nucleotide sequence of every possible gene variant (including mRNA splice variants) targeted by the dsRNA or analog thereof. In one embodiment, the nucleotide sequence of the dsRNA is selected from a conserved region or consensus sequence of an ERBB gene. In another embodiment, the nucleotide sequence of the dsRNA may be selectively or preferentially targeted to a certain sequence contained in an mRNA splice variant of an ERBB gene.

[0146] In certain embodiments, methods are provided for selecting one or more dsRNA molecule that decreases expression of an ERBB gene by RNAi, comprising a first strand that is complementary to an ERBB mRNA set forth in any one of SEQ ID NOS:1158-1161, 1803, 1804, 2543, 2544, and 3121 and a second strand that is complementary to the first strand, wherein the first and second strands form a double-stranded region of about 15 to about 40 base pairs (see, e.g., ERBB sequences in the Sequence Listing identified herein), and wherein at least one uridine of the dsRNA molecule is replaced with a 5-methyluridine, 2-thioribothymidine, or 2′-O-methyl-5-methyluridine, which methods employ “off-target” profiling whereby one or more dsRNA provided herein is contacted with a cell, either in vivo or in vitro, and total mRNA is collected for use in probing a microarray comprising oligonucleotides having one or more nucleotide sequence from a panel of known genes, including non-ERBB genes (e.g., interferon). Within related embodiments, one or more dsRNA molecule that decreases expressioni of an ERBB gene by RNAi may further comprise a third strand that is complementary to the first strand, wherein the first and third strands form a double-stranded region wherein the double-stranded region formed by the first and third strands is non-overlapping with a double-stranded region formed by the first and second strands. The “off-target” profile of the dsRNA provided herein is quantified by determining the number of non-ERBB genes having reduced expression levels in the presence of the candidate dsRNAs. The existence of “off target” binding indicates a dsRNA is capable of specifically binding to one or more non-ERBB gene messages. In certain embodiments, a dsRNA as provided herein (see, e.g., sequences in the Sequence Listing identified herein) applicable to therapeutic use will exhibit a greater stability, minimal interferon response, and little or no “off-target” binding.

[0147] Still further embodiments provide methods for selecting more efficacious dsRNA by using one or more reporter gene constructs comprising a constitutive promoter, such as a cytomegalovirus (CMV) or phosphoglycerate kinase (PGK) promoter, operably fused to, and capable of altering the expression of one or more reporter genes, such as a luciferase, chloramphenicol (CAT), or β-galactosidase, which, in turn, is operably fused in-frame with a dsRNA (such as one having a length between about 15 base-pairs and about 40 base-pairs or from about 5 nucleotides to about 24 nucleotides, or about 25 nucleotides to about 40 nucleotides) that contains an ERBB sequence, as provided herein.

[0148] Individual reporter gene expression constructs may be co-transfected with one or more dsRNA or analog thereof. The capacity of a given dsRNA to reduce the expression level of ERBB may be determined by comparing the measured reporter gene activity in cells transfected with or without a dsRNA molecule of interest.

[0149] Certain embodiments disclosed herein provide methods for selecting one or more modified dsRNA molecule(s) that employ the step of predicting the stability of a dsRNA duplex. In some embodiments, such a prediction is achieved by employing a theoretical melting curve wherein a higher theoretical melting curve indicates an increase in dsRNA duplex stability and a concomitant decrease in cytotoxic effects. Alternatively, stability of a dsRNA duplex may be determined empirically by measuring the hybridization of a single RNA analog strand as described herein to a complementary target gene within, for example, a polynucleotide array. The melting temperature (i.e., the Tₘ value) for each modified RNA and complementary RNA immobilized on the array can be determined and, from this Tₘ value, the relative stability of the modified RNA pairing with a complementary RNA molecule determined.

[0150] For example, Kawase et al. (Nucleic Acids Res. 14:7727, 1986) have described an analysis of the nucleotide-pairing properties of Di (inosine) to A, C, G, and T, which was achieved by measuring the hybridization of oligonucleotides (ODNs) with Di in various positions to complementary sets of ODNs made as an array. The relative strength of nucleotide-pairing is I-C>I-A>I-G≈I-T. Generally, Di containing duplexes showed lower Tₘ values when compared to the corresponding wild type (WT) nucleotide pair. The stabilization of Di by pairing was in order of Dc>Da>Dg>Dt>Du. As a person of skill in the art would understand, although universal-binding nucleotides are used herein as an example of determining duplex stability (i.e., the Tₘ value), other nucleotide substitutions (e.g., 5-methyluridine for uridine) or further modifications (e.g., a ribose modification at the 2′-position) can also be evaluated by these or similar methods.

[0151] In still further embodiments of the presently disclosed methods, one or more anti-codon within an antisense strand of a dsRNA molecule or analog thereof is substituted with a universal-binding nucleotide in a second or third position in the anti-codon of the antisense strand. By substituting a universal-binding nucleotide for a first or second position, the one or more first or second position nucleotide-pair substitution allows the substituted dsRNA molecule to specifically bind to mRNA wherein a first or a second position nucleotide-pair substitution has occurred, wherein the one or more nucleotide-pair substitution results in an amino acid change in the corresponding gene product.

[0152] Any of these methods of identifying dsRNA of interest can also be used to examine a dsRNA that decreases expression of an ERBB gene by RNA interference, comprising a first strand that is complementary to an ERBB mRNA set forth in any one of SEQ ID NOS:1158-1161, 1803, 1804, 2543, 2544, and 3121 and a second and third strand that have non-overlapping complementarity to the first strand, wherein the first and at least one of the second or third strand optionally form a double-stranded region of about 5 to about 13 base pairs; wherein at least one pyrimidine of the dsRNA comprises a pyrimidine nucleoside according to Formula I or II:

[chemical structure]

wherein R¹ and R² are each independently a —H, —OH, —OCH₃, —OCH₂OCH₂CH₃, —OCH₂CH₂OCH₃, halogen, substituted or unsubstituted C₁-C₁₀ alkyl, alkoxy, alkoxyalkyl, hydroxyalkyl, carboxyalkyl, alkylsulfonylamino, aminoalkyl, dialkylamino, alkylaminoalkyl, dialkylaminoalkyl, haloalkyl, trifluoromethyl, cycloalkyl, (cycloalkyl)alkyl, substituted or unsubstituted C₂-C₁₀ alkenyl, substituted or unsubstituted —O-allyl, —O—CH₂CH═CH₂, —O—CH═CHCH₃, substituted or unsubstituted C₂-C₁₀ alkynyl, carbamoyl, carbamyl, carboxy, carbonylamino, substituted or unsubstituted aryl, substituted or unsubstituted aralkyl, —NH₂, —NO₂, —C≡N, or heterocyclo group; R³ and R⁴ are each independently a hydroxyl, a protected hydroxyl, or an internucleoside linking group; and R⁵ and R⁸ are independently O or S. In certain embodiments, at least one nucleoside is according to Formula I in which R¹ is methyl and R² is —OH, or R¹ is methyl, R² is —OH, and R⁸ is S. In certain embodiments, at least one nucleoside is according to Formula I in which R¹ is methyl and R² is —O-methyl, or R¹ is methyl, R² is —O-methyl, and R⁸ is O. In other embodiments, the internucleoside linking group covalently links from about 5 to about 40 nucleosides.

### Compositions and Methods of Use

[0153] As set forth herein, dsRNA of the instant disclosure are designed to target an ERBB gene (including one or more mRNA splice variant thereof) that is expressed at an elevated level or continues to be expressed when it should not, and is a causal or contributing factor associated with, for example, cancer of one or more of the breast, bladder, prostate, kidney, lung, colon, oesophagus, endometrium, cervix, head and neck, non-small-cell lung, glioma, ovary, pancreas, and oral squamous cells. In this context, a dsRNA or analog thereof of this disclosure will effectively downregulate expression of an ERBB gene to levels that prevent, alleviate, or reduce the severity or recurrence of one or more associated disease symptoms. Alternatively, for various distinct disease models in which expression of an ERBB gene is not necessarily elevated as a consequence or sequel of disease or other adverse condition, down regulation of an ERBB gene will nonetheless result in a therapeutic result by lowering gene expression (i.e., to reduce levels of a selected mRNA or protein product of an EGFR, ERBB2, ERBB3, or ERBB4 gene). Furthermore, dsRNAs of this disclosure may be targeted to lower expression of ERBB, which can result in upregulation of a “downstream” gene whose expression is negatively regulated, directly or indirectly, by an ERBB protein. The dsRNA molecules of the instant disclosure comprise useful reagents and can be used in methods for a variety of therapeutic, diagnostic, target validation, genomic discovery, genetic engineering, and pharmacogenomic applications.

[0154] In certain embodiments, aqueous suspensions contain dsRNA of this disclosure in admixture with suitable excipients, such as suspending agents or dispersing or wetting agents. Exemplary suspending agents include sodium carboxymethylcellulose, methylcellulose, hydropropyl-methylcellulose, sodium alginate, polyvinylpyrrolidone, gum tragacanth and gum acacia. Representative dispersing or wetting agents include naturally-occurring phosphatides (e.g., lecithin), condensation products of an alkylene oxide with fatty acids (e.g., polyoxyethylene stearate), condensation products of ethylene oxide with long chain aliphatic alcohols (e.g., heptadecaethyleneoxycetanol), condensation products of ethylene oxide with partial esters derived from fatty acids and hexitol (e.g., polyoxyethylene sorbitol monooleate), or condensation products of ethylene oxide with partial esters derived from fatty acids and hexitol anhydrides (e.g., polyethylene sorbitan monooleate). In certain embodiments, the aqueous suspensions can optionally contain one or more preservatives (e.g., ethyl or n-propyl-p-hydroxybenzoate), one or more coloring agents, one or more flavoring agents, or one or more sweetening agents (e.g., sucrose, saccharin). In additional embodiments, dispersible powders and granules suitable for preparation of an aqueous suspension by the addition of water provide dsRNA of this disclosure in admixture with a dispersing or wetting agent, suspending agent and optionally one or more preservative, coloring agent, flavoring agent, or sweetening agent.

[0155] The present disclosure includes dsRNA compositions prepared for storage or administration that include a pharmaceutically effective amount of a desired compound in a pharmaceutically acceptable carrier or diluent. Acceptable carriers or diluents for therapeutic use are well known in the pharmaceutical art, and are described, for example, in Remington's Pharmaceutical Sciences, Mack Publishing Co., A. R. Gennaro edit., 1985, hereby incorporated by reference herein. In certain embodiments, pharmaceutical compositions of this disclosure can optionally include preservatives, antioxidants, stabilizers, dyes, flavoring agents, or any combination thereof. Exemplary preservatives include sodium benzoate, sorbic acid, chlorobutanol, and esters of p-hydroxybenzoic acid.

[0156] The dsRNA compositions of the instant disclosure can be effectively employed as pharmaceutically-acceptable formulations. Pharmaceutically-acceptable formulations prevent, alter the occurrence or severity of, or treat (alleviate one or more symptom(s) to a detectable or measurable extent) of a disease state or other adverse condition in a subject. A pharmaceutically acceptable formulation includes salts of the above compounds, e.g., acid addition salts, such as salts of hydrochloric acid, hydrobromic acid, acetic acid, or benzene sulfonic acid. A pharmaceutical composition or formulation refers to a composition or formulation in a form suitable for administration into a cell, or a subject such as a human (e.g., systemic administration). The formulations of the present disclosure, having an amount of dsRNA sufficient to treat or prevent a disorder associated with ERBB gene expression are, for example, suitable for topical (e.g., creams, ointments, skin patches, eye drops, ear drops) application or administration. Other routes of administration include oral, parenteral, sublingual, bladder wash-out, vaginal, rectal, enteric, suppository, nasal, and inhalation. The term parenteral, as used herein, includes subcutaneous, intravenous, intramuscular, intraarterial, intraabdominal, intraperitoneal, intraarticular, intraocular or retrobulbar, intraaural, intrathecal, intracavitary, intracelial, intraspinal, intrapulmonary or transpulmonary, intrasynovial, and intraurethral injection or infusion techniques. Some pharmaceutical compositions of this disclosure are formulated so that the dsRNA contained therein is bioavailable upon administration to a subject.

[0157] In further embodiments, dsRNA of this disclosure can be formulated as oily suspensions or emulsions (e.g., oil-in-water) by suspending dsRNA in, for example, a vegetable oil (e.g., arachis oil, olive oil, sesame oil or coconut oil) or a mineral oil (e.g., liquid paraffin). Suitable emulsifying agents can be naturally-occurring gums (e.g., gum acacia or gum tragacanth), naturally-occurring phosphatides (e.g., soy bean, lecithin, esters or partial esters derived from fatty acids and hexitol), anhydrides (e.g., sorbitan monooleate), or condensation products of partial esters with ethylene oxide (e.g., polyoxyethylene sorbitan monooleate). In certain embodiments, the oily suspensions or emulsions can optionally contain a thickening agent, such as beeswax, hard paraffin or cetyl alcohol. In related embodiments, sweetening agents and flavoring agents can optionally be added to provide palatable oral preparations. In yet other embodiments, these compositions can be preserved by optionally adding an anti-oxidant, such as ascorbic acid.

[0158] In further embodiments, dsRNA of this disclosure can be formulated as syrups and elixirs with sweetening agents (e.g., glycerol, propylene glycol, sorbitol, glucose or sucrose). Such formulations can also contain a demulcent, preservative, flavoring, coloring agent, or any combination thereof. In other embodiments, pharmaceutical compositions comprising dsRNA of this disclosure can be in the form of a sterile, injectable aqueous or oleaginous suspension. The sterile injectable preparation can also be a sterile, injectable solution or suspension in a non-toxic parenterally acceptable diluent or solvent (e.g., as a solution in 1,3-butanediol). Among the exemplary acceptable vehicles and solvents useful in the compositions of this disclosure is water, Ringer's solution, or isotonic sodium chloride solution. In addition, sterile, fixed oils may be employed as a solvent or suspending medium for the dsRNA of this disclosure. For this purpose, any bland fixed oil can be employed including synthetic mono- or diglycerides. In addition, fatty acids such as oleic acid find use in the preparation of parenteral formulations.

[0159] Within certain embodiments of this disclosure, pharmaceutical compositions and methods are provided that feature the presence or administration of one or more dsRNA or analogs thereof of this disclosure, combined, complexed, or conjugated with a polypeptide, optionally formulated with a pharmaceutically-acceptable carrier, such as a diluent, stabilizer, buffer, or the like. The negatively charged dsRNA molecules of this disclosure may be administered to a patient by any standard means, with or without stabilizers, buffers, or the like, to form a composition suitable for treatment. When it is desired to use a liposome delivery mechanism, standard protocols for formation of liposomes can be followed. The compositions of the present disclosure may also be formulated and used as a tablet, capsule or elixir for oral administration, suppository for rectal administration, sterile solution, or suspension for injectable administration, either with or without other compounds known in the art. Thus, dsRNAs of the present disclosure may be administered in any form, such as nasally, transdermally, parenterally, or by local injection.

[0160] In accordance with this disclosure, dsRNA molecules (optionally substituted or modified or conjugated), compositions thereof, and methods for inhibiting expression of an ERBB gene in a cell or organism are provided. In certain embodiments, this disclosure provides methods and dsRNA compositions for treating a subject, including a human cell, tissue or individual, having a disease or at risk of developing a disease caused by or associated with the expression of an ERBB gene. In one embodiment, the method includes administering a dsRNA of this disclosure or a pharmaceutical composition containing the dsRNA to a cell or an organism, such as a mammal, such that expression of the target gene is silenced. Subjects (e.g., mammalian, human) amendable for treatment using the dsRNA molecules (optionally substituted or modified or conjugated), compositions thereof, and methods of the present disclosure include those suffering from one or more disease or condition mediated, at least in part, by overexpression or inappropriate expression of an ERBB gene, or which are amenable to treatment by reducing expression of an ERBB protein, including cancer of one or more of the breast, bladder, prostate, kidney, lung, colon, oesophagus, endometrium, cervix, head and neck, non-small-cell lung, glioma, ovary, pancreas, and oral squamous cells. Within exemplary embodiments, the compositions and methods of this disclosure are also useful as therapeutic tools to regulate expression of ERBB to treat or prevent symptoms of, for example, the conditions listed above.

[0161] In any of the methods disclosed herein there may be used with one or more dsRNA, or substituted or modified dsRNA, as described herein, comprising a first strand that is complementary to a human v-Erb erythroblastic leukemia viral oncogene (ERBB) mRNA as set forth in any one of SEQ ID NOS:1158-1161, 1803, 1804, 2543, 2544, and 3121, and a second strand and a third strand that is each complementary to non-overlapping regions of the first strand, wherein the second strand and third strands can anneal with the first strand to form at least two double-stranded regions spaced apart by up to 10 nucleotides and thereby forming a gap between the second and third strands, and wherein the mdRNA molecule optionally includes at least one double-stranded region of 5 base pairs to 13 base pairs. In other embodiments, subjects can be effectively treated prophylactically or therapeutically by administering an effective amount of one or more dsRNA having a first strand that is complementary to a human v-Erb erythroblastic leukemia viral oncogene (ERBB) mRNA as set forth in any one of SEQ ID NOS:1158-1161, 1803, 1804, 2543, 2544, and 3121, and a second strand and a third strand that is each complementary to non-overlapping regions of the first strand, wherein the second strand and third strands can anneal with the first strand to form at least two double-stranded regions spaced apart by up to 10 nucleotides and thereby forming a gap between the second and third strands, and wherein the mdRNA molecule optionally includes at least one double-stranded region of 5 base pairs to 13 base pairs and at least one pyrimidine of the mdRNA has a pyrimidine nucleoside according to Formula I or II:

[chemical structure]

wherein R¹ and R² are each independently a —H, —OH, —OCH₃, —OCH₂OCH₂CH₃, —OCH₂CH₂OCH₃, halogen, substituted or unsubstituted C₁-C₁₀ alkyl, alkoxy, alkoxyalkyl, hydroxyalkyl, carboxyalkyl, alkylsulfonylamino, aminoalkyl, dialkylamino, alkylaminoalkyl, dialkylaminoalkyl, haloalkyl, trifluoromethyl, cycloalkyl, (cycloalkyl)alkyl, substituted or unsubstituted C₂-C₁₀ alkenyl, substituted or unsubstituted —O-allyl, —O—CH₂CH═CH₂, —O—CH═CHCH₃, substituted or unsubstituted C₂-C₁₀ alkynyl, carbamoyl, carbamyl, carboxy, carbonylamino, substituted or unsubstituted aryl, substituted or unsubstituted aralkyl, —NH₂, —NO₂, —C≡N, or heterocyclo group; R³ and R⁴ are each independently a hydroxyl, a protected hydroxyl, or an internucleoside linking group; and R⁵ and R⁸ are independently O or S. In certain embodiments, at least one nucleoside is according to Formula I in which R¹ is methyl and R² is —OH, or R¹ is methyl, R² is —OH, and R⁸ is S. In certain embodiments, at least one nucleoside is according to Formula I in which R¹ is methyl and R² is —O-methyl, or R¹ is methyl, R² is —O-methyl, and R⁸ is O. In other embodiments, the internucleoside linking group covalently links from about 5 to about 40 nucleosides.

[0162] In any of the methods described herein, the dsRNA used may include multiple modifications. For example, a dsRNA can have at least one 5-methyluridine, 2′-O-methyl-5-methyluridine, LNA, 2′-methoxy, 2′-fluoro, 2′-deoxy, phosphorothioate linkage, inverted base terminal cap, or any combination thereof. In certain exemplary methods, a dsRNA will have from one to all 5-methyluridines and have up to about 75% LNA. In other exemplary methods, a dsRNA will have from one to all 5-methyluridines and have up to about 75% 2′-methoxy provided the 2′-methoxy are not at the Argonaute cleavage site. In still other exemplary methods, a dsRNA will have from one to all 5-methyluridines and have up to about 100% 2′-fluoro substitutions. In further exemplary methods, a dsRNA will have from one to all 5-methyluridines and have up to about 75% 2′-deoxy. In further exemplary methods, a dsRNA will have up to about 75% LNA and have up to about 75% 2′-methoxy. In still other embodiments, a dsRNA will have up to about 75% LNA and have up to about 100% 2′-fluoro. In further exemplary methods, a dsRNA will have up to about 75% LNA and have up to about 75% 2′-deoxy. In further exemplary methods, a dsRNA will have up to about 75% 2′-methoxy and have up to about 100% 2′-fluoro. In further exemplary methods, a dsRNA will have up to about 75% 2′-methoxy and have up to about 75% 2′-deoxy. In further embodiments, a dsRNA will have up to about 100% 2′-fluoro and have up to about 75% 2′-deoxy.

[0163] In other exemplary methods for using multiply modified dsRNA, a dsRNA will have from one to all uridines substituted with 5-methyluridine, up to about 75% LNA, and up to about 75% 2′-methoxy. In still further exemplary methods, a dsRNA will have from one to all 5-methyluridines, up to about 75% LNA, and up to about 100% 2′-fluoro. In further exemplary methods, a dsRNA will have from one to all 5-methyluridines, up to about 75% LNA, and up to about 75% 2′-deoxy. In further exemplary methods, a dsRNA will have from one to all 5-methyluridines, up to about 75% 2′-methoxy, and up to about 75% 2′-fluoro. In further exemplary methods, a dsRNA will have from one to all 5-methyluridines, up to about 75% 2′-methoxy, and up to about 75% 2′-deoxy. In more exemplary methods, a dsRNA will have from one to all 5-methyluridines, up to about 100% 2′-fluoro, and up to about 75% 2′-deoxy. In yet other exemplary methods, a dsRNA will have from one to all 5-methyluridines, up to about 75% LNA, up to about 75% 2′-methoxy, up to about 100% 2′-fluoro, and up to about 75% 2′-deoxy. In other exemplary methods, a dsRNA will have up to about 75% LNA, up to about 75% 2′-methoxy, and up to about 100% 2′-fluoro. In further exemplary methods, a dsRNA will have up to about 75% LNA, up to about 75% 2′-methoxy, and up to about 75% 2′-deoxy. In more exemplary methods, a dsRNA will have up to about 75% LNA, up to about 100% 2′-fluoro, and up to about 75% 2′-deoxy. In still further exemplary methods, a dsRNA will have up to about 75% 2′-methoxy, up to about 100% 2′-fluoro, and up to about 75% 2′-deoxy.

[0164] In any of these exemplary methods for using multiply modified dsRNA, the dsRNA may further comprise up to 100% phosphorothioate internucleoside linkages, from one to ten or more inverted base terminal caps, or any combination thereof. Additionally, any of these dsRNA may have these multiple modifications on one strand, two strands, three strands, a plurality of strands, or all strands, or on the same or different nucleoside within a dsRNA molecule. Finally, in any of these multiple modification dsRNA, the dsRNA must have gene silencing activity.

[0165] In further embodiments, subjects can be effectively treated, prophylactically or therapeutically, by administering an effective amount of one or more dsRNA, or substituted or modified dsRNA as described herein, having a first strand that is complementary to an ERBB mRNA as set forth in any one of SEQ ID NOS:1158-1161, 1803, 1804, 2543, 2544, and 3121, and a second strand and a third strand that is each complementary to non-overlapping regions of the first strand, wherein the second strand and third strands can anneal with the first strand to form at least two double-stranded regions spaced apart by up to 10 nucleotides and thereby forming a gap between the second and third strands, and wherein the combined double-stranded regions total about 15 base pairs to about 40 base pairs and the mdRNA molecule optionally has blunt ends. In still further embodiments, methods disclosed herein there may be used with one or more dsRNA that comprises a first strand that is complementary to an ERBB mRNA as set forth in any one of SEQ ID NOS:1158-1161, 1803, 1804, 2543, 2544, and 3121, and a second strand and a third strand that is each complementary to non-overlapping regions of the first strand, wherein the second strand and third strands can anneal with the first strand to form at least two double-stranded regions spaced apart by up to 10 nucleotides and thereby forming a gap between the second and third strands, and wherein the combined double-stranded regions total about 15 base pairs to about 40 base pairs, the mdRNA molecule optionally includes at least one double-stranded region of 5 base pairs to 13 base pairs, optionally has blunt ends, or any combination thereof, and at least one pyrimidine of the mdRNA is substituted with a pyrimidine nucleoside according to Formula I or II:

[chemical structure]

wherein R¹ and R² are each independently a —H, —OH, —OCH₃, —OCH₂OCH₂CH₃, —OCH₂CH₂OCH₃, halogen, substituted or unsubstituted C₁-C₁₀ alkyl, alkoxy, alkoxyalkyl, hydroxyalkyl, carboxyalkyl, alkylsulfonylamino, aminoalkyl, dialkylamino, alkylaminoalkyl, dialkylaminoalkyl, haloalkyl, trifluoromethyl, cycloalkyl, (cycloalkyl)alkyl, substituted or unsubstituted C₂-C₁₀ alkenyl, substituted or unsubstituted —O-allyl, —O—CH₂CH═CH₂, —O—CH═CHCH₃, substituted or unsubstituted C₂-C₁₀ alkynyl, carbamoyl, carbamyl, carboxy, carbonylamino, substituted or unsubstituted aryl, substituted or unsubstituted aralkyl, —NH₂, —NO₂, —C≡N, or heterocyclo group; R³ and R⁴ are each independently a hydroxyl, a protected hydroxyl, or an internucleoside linking group; and R⁵ and R⁸ are independently O or S. In certain embodiments, at least one nucleoside is according to Formula I in which R¹ is methyl and R² is —OH, or R¹ is methyl, R² is —OH, and R⁸ is S. In certain embodiments, at least one nucleoside is according to Formula I in which R¹ is methyl and R² is —O-methyl, or R¹ is methyl, R² is —O-methyl, and R⁸ is O. In other embodiments, the internucleoside linking group covalently links from about 5 to about 40 nucleosides.

[0166] Within additional aspects of this disclosure, combination formulations and methods are provided comprising an effective amount of one or more dsRNA of the present disclosure in combination with one or more secondary or adjunctive active agents that are formulated together or administered coordinately with the dsRNA of this disclosure to control an ERBB-associated disease or condition as described herein. Useful adjunctive therapeutic agents in these combinatorial formulations and coordinate treatment methods include, for example, enzymatic nucleic acid molecules, allosteric nucleic acid molecules, antisense, decoy, or aptamer nucleic acid molecules, antibodies such as monoclonal antibodies, small molecules and other organic or inorganic compounds including metals, salts and ions, and other drugs and active agents indicated for treating an ERBB-associated disease or condition, including chemotherapeutic agents used to treat cancer, steroids, non-steroidal anti-inflammatory drugs (NSAIDs), tyrosine kinase inhibitors, or the like.

[0167] Exemplary chemotherapeutic agents include alkylating agents (e.g., cisplatin, oxaliplatin, carboplatin, busulfan, nitrosoureas, nitrogen mustards, uramustine, temozolomide), antimetabolites (e.g., aminopterin, methotrexate, mercaptopurine, fluorouracil, cytarabine), taxanes (e.g., paclitaxel, docetaxel), anthracyclines (e.g., doxorubicin, daunorubicin, epirubicin, idaruicin, mitoxantrone, valrubicin), bleomycin, mytomycin, actinomycin, hydroxyurea, topoisomerase inhibitors (e.g., camptothecin, topotecan, irinotecan, etoposide, teniposide), monoclonal antibodies (e.g., alemtuzumab, bevacizumab, cetuximab, gemtuzumab, panitumumab, rituximab, tositumomab, trastuzumab), vinca alkaloids (e.g., vincristine, vinblastine, vindesine, vinorelbine), cyclophosphamide, prednisone, leucovorin, oxaliplatin.

[0168] To practice the coordinate administration methods of this disclosure, a dsRNA is administered, simultaneously or sequentially, in a coordinated treatment protocol with one or more of the secondary or adjunctive therapeutic agents contemplated herein. The coordinate administration may be done in any order, and there may be a time period while only one or both (or all) active therapeutic agents, individually or collectively, exert their biological activities. A distinguishing aspect of all such coordinate treatment methods is that the dsRNA present in a composition elicits some favorable clinical response, which may or may not be in conjunction with a secondary clinical response provided by the secondary therapeutic agent. For example, the coordinate administration of the dsRNA with a secondary therapeutic agent as contemplated herein can yield an enhanced (synergistic) therapeutic response beyond the therapeutic response elicited by either or both the purified dsRNA or secondary therapeutic agent alone.

[0169] In another embodiment, a dsRNA of this disclosure can include a conjugate member on one or more of the terminal nucleotides of a dsRNA. The conjugate member can be, for example, a lipophile, a terpene, a protein binding agent, a vitamin, a carbohydrate, or a peptide. For example, the conjugate member can be naproxen, nitroindole (or another conjugate that contributes to stacking interactions), folate, ibuprofen, or a C5 pyrimidine linker. In other embodiments, the conjugate member is a glyceride lipid conjugate (e.g., a dialkyl glyceride derivatives), vitamin E conjugates, or thio-cholesterols. Additional conjugate members include peptides that function, when conjugated to a modified dsRNA of this disclosure, to facilitate delivery of the dsRNA into a target cell, or otherwise enhance delivery, stability, or activity of the dsRNA when contacted with a biological sample (e.g., a target cell expressing ERBB). Exemplary peptide conjugate members for use within these aspects of this disclosure, include peptides PN27, PN28, PN29, PN58, PN61, PN73, PN158, PN159, PN173, PN182, PN183, PN₂O₂, PN₂O₄, PN250, PN361, PN365, PN₄O₄, PN453, PN509, and PN963, described, for example, in U.S. Patent Application Publication Nos. 2006/0040882 and 2006/0014289, and U.S. Provisional Patent Application Nos. 60/822,896 and 60/939,578; and PCT Application PCT/US2007/075744, which are all incorporated herein by reference. In certain embodiments, when peptide conjugate partners are used to enhance delivery of dsRNA of this disclosure, the resulting dsRNA formulations and methods will often exhibit further reduction of an interferon response in target cells as compared to dsRNAs delivered in combination with alternate delivery vehicles, such as lipid delivery vehicles (e.g., Lipofectamine™).

[0170] In still another embodiment, a dsRNA or analog thereof of this disclosure may be conjugated to the polypeptide and admixed with one or more non-cationic lipids or a combination of a non-cationic lipid and a cationic lipid to form a composition that enhances intracellular delivery of the dsRNA as compared to delivery resulting from contacting the target cells with a naked dsRNA. In more detailed aspects of this disclosure, the mixture, complex or conjugate comprising a dsRNA and a polypeptide can be optionally combined with (e.g., admixed or complexed with) a cationic lipid, such as Lipofectine™. To produce these compositions comprised of a polypeptide, dsRNA and a cationic lipid, the dsRNA and peptide may be mixed together first in a suitable medium such as a cell culture medium, after which the cationic lipid is added to the mixture to form a dsRNA/delivery peptide/cationic lipid composition. Optionally, the peptide and cationic lipid can be mixed together first in a suitable medium such as a cell culture medium, followed by the addition of the dsRNA to form the dsRNA/delivery peptide/cationic lipid composition.

[0171] This disclosure also features the use of dsRNA compositions comprising surface-modified liposomes containing, for example, poly(ethylene glycol) lipids (PEG-modified, or long-circulating liposomes or stealth liposomes) (Lasic et al., Chem. Rev. 95:2601, 1995; Ishiwata et al., Chem. Pharm. Bull. 43:1005, 1995; Lasic et al., Science 267:1275, 1995; Oku et al., Biochim. Biophys. Acta 1238:86, 1995; Liu et al., J. Biol. Chem. 42:24864, 1995; PCT Publication Nos. WO 96/10391; WO 96/10390; WO 96/10392).

[0172] In another embodiment, compositions are provided for targeting dsRNA molecules of this disclosure to specific cell types, such as hepatocytes. For example, dsRNA can be complexed or conjugated glycoproteins or synthetic glycoconjugates glycoproteins or synthetic glycoconjugates having branched galactose (e.g., asialoorosomucoid), N-acetyl-D-galactosamine, or mannose (see, e.g., Wu and Wu, J. Biol. Chem. 262:4429, 1987; Baenziger and Fiete, Cell 22: 611, 1980; Connolly et al., J. Biol. Chem. 257:939, 1982; Lee and Lee, Glycoconjugate J. 4:317, 1987; Ponpipom et al., J. Med. Chem. 24:1388, 1981) for a targeted delivery to, for example, the liver.

[0173] A pharmaceutically effective dose is that dose required to prevent, inhibit the occurrence of, or treat (alleviate a symptom to some extent, preferably all of the symptoms) a disease state. The pharmaceutically effective dose depends on the type of disease, the composition used, the route of administration, the type of subject being treated, the physical characteristics of the specific subject under consideration for treatment, concurrent medication, and other factors that those skilled in the medical arts will recognize. For example, an amount between 0.1 mg/kg and 100 mg/kg body weight/day of active ingredients may be administered depending on the potency of a dsRNA of this disclosure.

[0174] A specific dose level for any particular patient depends upon a variety of factors including the activity of the specific compound employed, age, body weight, general health, sex, diet, time of administration, route of administration, rate of excretion, drug combination, and the severity of the particular disease undergoing therapy. Following administration of dsRNA compositions as disclosed herein, test subjects will exhibit about a 10% up to about a 99% reduction in one or more symptoms associated with the disease or disorder being treated, as compared to placebo-treated or other suitable control subjects.

[0175] Dosage levels in the order of about 0.1 mg to about 140 mg per kilogram of body weight per day can be useful in the treatment of the above-indicated conditions (about 0.5 mg to about 7 g per patient per day). The amount of active ingredient that can be combined with the carrier materials to produce a single dosage form varies depending upon the host treated and the particular mode of administration. Dosage unit forms generally contain between from about 1 mg to about 500 mg of an active ingredient.

[0176] A dosage form of a dsRNA or composition thereof of this disclosure can be liquid, an emulsion, or a micelle, or in the form of an aerosol or droplets. A dosage form of a dsRNA or composition thereof of this disclosure can be solid, which can be reconstituted in a liquid prior to administration. The solid can be administered as a powder. The solid can be in the form of a capsule, tablet, or gel. In addition to in vivo gene inhibition, a skilled artisan will appreciate that the dsRNA and analogs thereof of the present disclosure are useful in a wide variety of in vitro applications, such as scientific and commercial research (e.g., elucidation of physiological pathways, drug discovery and development), and medical and veterinary diagnostics.

[0177] Nucleic acid molecules and polypeptides can be administered to cells by a variety of methods known to those of skill in the art, including administration within formulations that comprise a dsRNA alone, a dsRNA and a polypeptide complex/conjugate alone, or that further comprise one or more additional components, such as a pharmaceutically acceptable carrier, diluent, excipient, adjuvant, emulsifier, stabilizer, preservative, or the like. Other exemplary substances used to approximate physiological conditions include pH adjusting and buffering agents, tonicity adjusting agents, and wetting agents, for example, sodium acetate, sodium lactate, sodium chloride, potassium chloride, calcium chloride, sorbitan monolaurate, triethanolamine oleate, and mixtures thereof. For solid compositions, conventional nontoxic pharmaceutically acceptable carriers can be used which include, for example, pharmaceutical grades of mannitol, lactose, starch, magnesium stearate, sodium saccharin, talcum, cellulose, glucose, sucrose, magnesium carbonate, and the like.

[0178] In certain embodiments, the dsRNA and compositions thereof can be encapsulated in liposomes, administered by iontophoresis, or incorporated into other vehicles, such as hydrogels, cyclodextrins, biodegradable nanocapsules, bioadhesive microspheres, or proteinaceous vectors (see, e.g., PCT Publication No. WO 00/53722). In certain embodiments of this disclosure, the dsRNA may be administered in a time release formulation, for example, in a composition that includes a slow release polymer. The dsRNA can be prepared with carriers that will protect against rapid release, for example, a controlled release vehicle such as a polymer, microencapsulated delivery system, or bioadhesive gel. Prolonged delivery of the dsRNA, in various compositions of this disclosure can be brought about by including in the composition agents that delay absorption, for example, aluminum monosterate hydrogels and gelatin.

[0179] Alternatively, a dsRNA composition of this disclosure can be locally delivered by direct injection or by use of, for example, an infusion pump. Direct injection of dsRNAs of this disclosure, whether subcutaneous, intramuscular, or intradermal, can be done by using standard needle and syringe methodologies or by needle-free technologies, such as those described in Conry et al. (Clin. Cancer Res. 5:2330, 1999) and PCT Publication No. WO 99/31262.

[0180] The dsRNA of this disclosure and compositions thereof may be administered to subjects by a variety of mucosal administration modes, including oral, rectal, vaginal, intranasal, intrapulmonary, or transdermal delivery, or by topical delivery to the eyes, ears, skin, or other mucosal surfaces. In one embodiment, the mucosal tissue layer includes an epithelial cell layer, which can be pulmonary, tracheal, bronchial, alveolar, nasal, buccal, epidermal, or gastrointestinal. Compositions of this disclosure can be administered using conventional actuators, such as mechanical spray devices, as well as pressurized, electrically activated, or other types of actuators. The dsRNAs can also be administered in the form of suppositories, e.g., for rectal administration. For example, these compositions can be mixed with an excipient that is solid at room temperature but liquid at the rectal temperature so that the dsRNA is released. Such materials include, for example, cocoa butter and polyethylene glycols.

[0181] Further methods for delivery of nucleic acid molecules, such as the dsRNAs of this disclosure, are described, for example, in Boado et al., J. Pharm. Sci. 87:1308, 1998; Tyler et al., FEBS Lett. 421:280, 1999; Pardridge et al., Proc. Nat'l Acad. Sci. USA 92:5592, 1995; Boado, Adv. Drug Delivery Rev. 15:73, 1995; Aldrian-Herrada et al., Nucleic Acids Res. 26:4910, 1998; Tyler et al., Proc. Natl. Acad. Sci. USA 96:7053-7058, 1999; Akhtar et al., Trends Cell Bio. 2:139, 1992; “Delivery Strategies for Antisense Oligonucleotide Therapeutics,” ed. Akhtar, 1995, Maurer et al., Mol. Membr. Biol. 16:129, 1999; Hofland and Huang, Handb. Exp. Pharmacol 137:165, 1999; and Lee et al., ACS Symp. Ser. 752:184, 2000; PCT Publication No. WO 94/02595.

[0182] All U.S. patents, U.S. patent application publications, U.S. patent applications, foreign patents, foreign patent applications, non-patent publications, figures, tables, and websites referred to in this specification are expressly incorporated herein by reference, in their entirety.

### EXAMPLES

### Example 1

### Knockdown of Gene Expression by mdRNA

[0183] The gene silencing activity of dsRNA as compared to nicked or gapped versions of the same dsRNA was examined using a dual fluorescence assay. A total of 22 different genes were targeted at ten different sites each (see Table 1).

[0184] A Dicer substrate dsRNA molecule was used, which has a 25 nucleotide sense strand, a 27 nucleotide antisense strand, and a two deoxynucleotide overhang at the 3′-end of the antisense strand (referred to as a 25/27 dsRNA). The nicked version of each dsRNA Dicer substrate has a nick at one of positions 9 to 16 on the sense strand as measured from the 5′-end of the sense strand. For example, an ndsRNA having a nick at position 11 has three strands—a 5′-sense strand of 11 nucleotides, a 3′-sense strand of 14 nucleotides, and an antisense strand of 27 nucleotides (which is also referred to as an N11-14/27 mdRNA). In addition, each of the sense strands of the ndsRNA have three locked nucleic acids (LNAs) evenly distributed along each sense fragment. If the nick is at position 9, then the LNAs can be found at positions 2, 6, and 9 of the 5′ sense strand fragment and at positions 11, 18, and 23 of the 3′ sense strand fragment. If the nick is at position 10, then the LNAs can be found at positions 2, 6, and 10 of the 5′ sense strand fragment and at positions 12, 18, and 23 of the 3′ sense strand fragment. If the nick is at position 11, then the LNAs can be found at positions 2, 6, and 11 of the 5′ sense strand fragment and at positions 13, 18, and 23 of the 3′ sense strand fragment. If the nick is at position 12, then the LNAs can be found at positions 2, 6, and 12 of the 5′ sense strand fragment and at positions 14, 18, and 23 of the 3′ sense strand fragment. If the nick is at position 13, then the LNAs can be found at positions 2, 7, and 13 of the 5′ sense strand fragment and at positions 15, 18, and 23 of the 3′ sense strand fragment. If the nick is at position 14, then the LNAs can be found at positions 2, 7, and 14 of the 5′ sense strand fragment and at positions 16, 18, and 23 of the 3′ sense strand fragment. If the nick is at position 15, then the LNAs can be found at positions 2, 8, and 15 of the 5′ sense strand fragment and at positions 17, 19, and 23 of the 3′ sense strand fragment. If the nick is at position 16, then the LNAs can be found at positions 2, 8, and 16 of the 5′ sense strand fragment and at positions 18, 19, and 23 of the 3′ sense strand fragment. Similarly, a gapped version of each dsRNA Dicer substrate has a single nucleotide missing at one of positions 10 to 17 on the sense strand as measured from the 5′-end of the sense strand. For example, a gdsRNA having a gap at position 11 has three strands—a 5′-sense strand of 11 nucleotides, a 3′-sense strand of 13 nucleotides, and an antisense strand of 27 nucleotides (which is also referred to as G11-(1)-13/27 mdRNA). In addition, each of the sense strands of the gdsRNA contain three locked nucleic acids (LNAs) evenly distributed along each sense fragment (as described for the nicked counterparts).

[0185] In sum, three dsRNA were tested at each of the ten different sites per gene—an unmodified dsRNA, a nicked mdRNA with three LNAs per sense strand fragment, and a single nucleotide gapped mdRNA with three LNAs per sense strand fragment. In other words, 660 different dsRNA were examined.

[0186] Briefly, multiwell plates were seeded with about 7−8×10⁵ HeLa cells/well in DMEM having 10% fetal bovine serum, and incubated overnight at 37° C./5% CO₂. The HeLa cell medium was changed to serum-free DMEM just prior to transfection. The psiCHECK™-2 vector, containing about a 1,000 basepair insert of a target gene, diluted in serum-free DMEM was mixed with diluted GenJet™ transfection reagent (SignalDT Biosystems, Hayward, Calif.) according to the manufacturer's instructions and then incubated at room temperature for 10 minutes. The GenJet/psiCHECK™-2-[target gene insert] solution was added to the HeLa cells and then incubated at 37° C., 5% CO₂ for 4.5 hours. After the vector transfection, cells were trypsinized and suspended in antibiotic-free DMEM containing 10% FBS at a concentration of 10⁵ cells per mL.

[0187] To transfect the dsRNA, the dsRNA was formulated in OPTI-MEM I reduced serum medium (Gibco® Invitrogen, Carlsbad, Calif.) and placed in multiwell plates. Then Lipofectamine™ RNAiMAX (Invitrogen) was mixed with OPTI-MEM per manufacture's specifications, added to each well containing dsRNA, mixed manually, and incubated at room temperature for 10-20 minutes. Then 30 μL of vector-transfected HeLa cells at 10⁵ cells per mL were added to each well (final dsRNA concentration of 25 nM), the plates were spun for 30 seconds at 1,000 rpm, and then incubated at 37° C./5% CO₂ for 2 days. The Cell Titer Blue (CTB) reagent (Promega, Madison, Wisconson) was used to assay for cell viability and proliferation—none of the dsRNA showed any substantial toxicity.

[0188] After transfecting, the media and CTB reagent were removed and the wells washed once with 100 PBS. Cells were assayed for firefly and Renilla luciferase reporter activity by first adding Dual-Glo™ Luciferase Reagent (Promega, Madison, Wis.) for 10 minutes with shaking, and then quantitating the luminescent signal on a VICTOR³™ 1420 Multilabel Counter (PerkinElmer). After measuring the firefly luminescence, Stop & Glob Reagent (Promega, Madison, Wis.) was added for 10 minutes with shaking to simultaneously quench the firefly reaction and initiate the Renilla luciferase reaction, which was then quantitated on a VICTOR³™ 1420 Multilabel Counter (PerkinElmer). The results are presented in Table 1.

TABLE 1
Gene Silencing Activity* of dsRNA Dicer Substrate and mdRNA (nicked or gapped) Dicer Substrate

| | | | Dicer | Dicer | | | | | | | | |
|---|---|---|---|---|---|---|---|---|---|---|---|---|
| | | | SEQ ID | Mean | Dicer | Nicked | Nicked | Nicked | Gapped | Gapped | Gapped | Length |
| Set | Target | Pos† | NOS‡ | (%) | 95% CI | SEQ ID NOS | Mean (%) | 95% CI | SEQ ID NOS | Mean (%) | 95% CI | 5′-S\hat{ } |
| 1 | AKT1 | 1862 | 63, 283 | 20.6 | 4.0% | 503, 723, 283 | 23.5 | 5.7% | 503, 940, 283 | 54.3 | 12.0% | 14 |
| 2 | AKT1 | 1883 | 64, 284 | 29.7 | 7.3% | 504, 724, 284 | 51.4 | 6.7% | 504, 941, 284 | 76.9 | 19.5% | 12 |
| 3 | AKT1 | 2178 | 65, 285 | 15.4 | 2.4% | 505, 725, 285 | 22.3 | 6.4% | 505, 942, 285 | 24.4 | 5.1% | 14 |
| 4 | AKT1 | 2199 | 66, 286 | 26.4 | 3.6% | 506, 726, 286 | 62.7 | 6.6% | 506, 943, 286 | 66.8 | 10.8% | 15 |
| 5 | AKT1 | 2264 | 67, 287 | 35.2 | 7.3% | 507, 727, 287 | 34.1 | 7.3% | 507, 944, 287 | 31.3 | 5.2% | 12 |
| 6 | AKT1 | 2580 | 68, 288 | 27.6 | 5.7% | 508, 728, 288 | 40.1 | 8.3% | 508, 945, 288 | 91.5 | 17.0% | 12 |
| 7 | AKT1 | 2606 | 69, 289 | 14.0 | 2.6% | 509, 729, 289 | 14.9 | 3.2% | 509, 946, 289 | 33.4 | 6.9% | 11 |
| 8 | AKT1 | 2629 | 70, 290 | 21.0 | 10.1% | 510, 730, 290 | 13.5 | 2.4% | 510, 947, 290 | 13.6 | 2.1% | 12 |
| 9 | AKT1 | 2661 | 71, 291 | 37.4 | 6.6% | 511, 731, 291 | 41.0 | 12.1% | 511, 948, 291 | 71.6 | 11.9% | 15 |
| 10 | AKT1 | 2663 | 72, 292 | 18.1 | 4.3% | 512, 732, 292 | 23.0 | 5.9% | 512, 949, 292 | 51.4 | 9.2% | 14 |
| 11 | BCR-ABL (b2a2) | 66 | 73, 293 | 16.9 | 5.9% | 513, 733, 293 | 30.4 | 10.5% | 513, 950, 293 | 38.2 | 11.7% | 13 |
| 12 | BCR-ABL (b2a2) | 190 | 74, 294 | 40.0 | 11.6% | 514, 734, 294 | 22.0 | 6.4% | 514, 951, 294 | 34.6 | 12.0% | 14 |
| 13 | BCR-ABL (b2a2) | 282 | 75, 295 | 24.2 | 5.2% | 515, 735, 295 | 37.6 | 8.2% | 515, 952, 295 | 34.6 | 8.6% | 13 |
| 14 | BCR-ABL (b2a2) | 284 | 76, 296 | 50.9 | 6.9% | 516, 736, 296 | 38.3 | 7.8% | 516, 953, 296 | 68.3 | 18.0% | 13 |
| 15 | BCR-ABL (b2a2) | 287 | 77, 297 | 45.5 | 13.2% | 517, 737, 297 | 39.6 | 11.5% | 517, 954, 297 | 75.2 | 17.2% | 14 |
| 16 | BCR-ABL (b2a2) | 289 | 78, 298 | 36.9 | 7.7% | 518, 738, 298 | 40.0 | 8.9% | 518, 955, 298 | 60.9 | 12.3% | 14 |
| 17 | BCR-ABL (b2a2) | 293 | 79, 299 | 55.9 | 9.8% | 519, 739, 299 | 58.6 | 14.7% | 519, 956, 299 | 87.0 | 14.3% | 13 |
| 18 | BCR-ABL (b2a2) | 461 | 80, 300 | 38.4 | 9.4% | 520, 740, 300 | 35.9 | 12.1% | 520, 957, 300 | 28.6 | 10.2% | 13 |
| 19 | BCR-ABL (b2a2) | 462 | 81, 301 | 31.1 | 13.7% | 521, 741, 301 | 26.5 | 5.5% | 521, 958, 301 | 35.8 | 10.7% | 14 |
| 20 | BCR-ABL (b2a2) | 561 | 82, 302 | 17.7 | 3.4% | 522, 742, 302 | 20.7 | 3.4% | 522, 959, 302 | 35.5 | 10.6% | 12 |
| 21 | BCR-ABL (b3a2) | 352 | 83, 303 | 45.4 | 7.0% | 523, 743, 303 | 39.8 | 8.3% | 523, 960, 303 | 45.5 | 11.0% | 12 |
| 22 | BCR-ABL (b3a2) | 353 | 84, 304 | 22.6 | 1.8% | 524, 744, 304 | 20.5 | 5.1% | 524, 961, 304 | 66.1 | 17.8% | 12 |
| 23 | BCR-ABL (b3a2) | 356 | 85, 305 | 11.9 | 2.5% | 525, 745, 305 | 28.4 | 5.8% | 525, 962, 305 | 56.0 | 10.6% | 13 |
| 24 | BCR-ABL (b3a2) | 357 | 86, 306 | 24.5 | 6.0% | 526, 746, 306 | 25.6 | 7.5% | 526, 963, 306 | 39.2 | 10.0% | 13 |
| 25 | BCR-ABL (b3a2) | 359 | 87, 307 | 56.8 | 9.3% | 527, 747, 307 | 42.4 | 7.3% | 527, 964, 307 | 46.4 | 9.5% | 13 |
| 26 | BCR-ABL (b3a2) | 360 | 88, 308 | 32.3 | 5.0% | 528, 748, 308 | 37.2 | 7.3% | 528, 965, 308 | 55.3 | 13.8% | 13 |
| 27 | BCR-ABL (b3a2) | 362 | 89, 309 | 12.4 | 3.2% | 529, 737, 309 | 26.3 | 9.8% | 529, 954, 309 | 46.2 | 8.3% | 14 |
| 28 | BCR-ABL (b3a2) | 410 | 90, 310 | 66.2 | 12.2% | 530, 749, 310 | 55.9 | 11.2% | 530, 966, 310 | 58.4 | 16.4% | 12 |
| 29 | BCR-ABL (b3a2) | 629 | 91, 311 | 35.0 | 11.7% | 531, 750, 311 | 46.5 | 10.1% | 531, 967, 311 | 41.0 | 9.0% | 13 |
| 30 | BCR-ABL (b3a2) | 727 | 92, 312 | 83.4 | 13.6% | 532, 751, 312 | 76.7 | 22.5% | 532, 968, 312 | 62.9 | 10.9% | 12 |
| 31 | EGFR | 4715 | 93, 313 | 15.3 | 2.2% | 533, 752, 313 | 9.4 | 0.9% | 533, 969, 313 | 11.3 | 1.7% | 11 |
| 32 | EGFR | 4759 | 94, 314 | 3.8 | 0.4% | 534, 753, 314 | 6.3 | 0.8% | 534, 970, 314 | 8.4 | 1.1% | 12 |
| 33 | EGFR | 4810 | 95, 315 | 5.2 | 0.6% | 535, 754, 315 | 5.8 | 0.7% | 535, 971, 315 | 7.2 | 1.0% | 13 |
| 34 | EGFR | 5249 | 96, 316 | 2.6 | 0.4% | 536, 755, 316 | 16.6 | 1.8% | 536, 972, 316 | 42.9 | 3.5% | 14 |
| 35 | EGFR | 5279 | 97, 317 | 7.6 | 1.0% | 537, 756, 317 | 10.6 | 1.1% | 537, 973, 317 | 11.8 | 1.7% | 13 |
| 36 | EGFR | 5374 | 98, 318 | 9.6 | 1.0% | 538, 757, 318 | 8.7 | 0.9% | 538, 974, 318 | 34.7 | 4.3% | 12 |
| 37 | EGFR | 5442 | 99, 319 | 4.1 | 0.8% | 539, 758, 319 | 15.1 | 1.8% | 539, 975, 319 | 19.7 | 2.4% | 12 |
| 38 | EGFR | 5451 | 100, 320 | 5.1 | 0.3% | 540, 759, 320 | 11.5 | 1.3% | 540, 976, 320 | 16.5 | 3.0% | 13 |
| 39 | EGFR | 5469 | 101, 321 | 5.6 | 0.8% | 541, 760, 321 | 5.1 | 0.5% | 541, 977, 321 | 12.2 | 2.5% | 13 |
| 40 | EGFR | 5483 | 102, 322 | 2.2 | 0.4% | 542, 761, 322 | 2.4 | 0.5% | 542, 978, 322 | 6.1 | 0.7% | 9 |
| 41 | FLT1 | 863 | 103, 323 | 7.6 | 1.1% | 543, 762, 323 | 10.2 | 3.3% | 543, 979, 323 | 29.2 | 8.1% | 12 |
| 42 | FLT1 | 906 | 104, 324 | 10.0 | 2.4% | 544, 763, 324 | 10.8 | 0.8% | 544, 980, 324 | 12.4 | 2.1% | 12 |
| 43 | FLT1 | 993 | 105, 325 | 12.2 | 2.5% | 545, 764, 325 | 13.7 | 2.8% | 545, 981, 325 | 20.0 | 11.3% | 13 |
| 44 | FLT1 | 1283 | 106, 326 | 19.6 | 4.5% | 546, 765, 326 | 25.8 | 7.3% | 546, 982, 326 | 18.7 | 6.5% | 12 |
| 45 | FLT1 | 1289 | 107, 327 | 15.5 | 2.0% | 547, 766, 327 | 13.5 | 1.6% | 547, 983, 327 | 22.5 | 5.0% | 12 |
| 46 | FLT1 | 1349 | 108, 328 | 36.8 | 4.2% | 548, 767, 328 | 22.9 | 4.0% | 548, 984, 328 | 52.7 | 5.4% | 14 |
| 47 | FLT1 | 1354 | 109, 329 | 36.6 | 4.0% | 549, 768, 329 | 49.7 | 5.9% | 549, 985, 329 | 45.8 | 9.3% | 14 |
| 48 | FLT1 | 1448 | 110, 330 | 9.3 | 2.5% | 550, 769, 330 | 16.1 | 2.9% | 550, 986, 330 | 24.2 | 3.6% | 13 |
| 49 | FLT1 | 1459 | 111, 331 | 13.7 | 3.6% | 551, 770, 331 | 20.0 | 8.7% | 551, 987, 331 | 22.4 | 4.4% | 12 |
| 50 | FLT1 | 1700 | 112, 332 | 7.9 | 2.2% | 552, 771, 332 | 11.2 | 3.7% | 552, 988, 332 | 36.4 | 8.0% | 13 |
| 51 | FRAP1 | 7631 | 113, 333 | 9.5 | 2.7% | 553, 772, 333 | 23.3 | 4.9% | 553, 989, 333 | 61.8 | 18.3% | 13 |
| 52 | FRAP1 | 7784 | 114, 334 | 15.1 | 1.7% | 554, 773, 334 | 19.9 | 2.8% | 554, 990, 334 | 29.3 | 3.4% | 12 |
| 53 | FRAP1 | 7812 | 115, 335 | 11.9 | 2.9% | 555, 774, 335 | 14.4 | 3.2% | 555, 991, 335 | 28.3 | 12.7% | 11 |
| 54 | FRAP1 | 7853 | 116, 336 | 16.8 | 3.3% | 556, 775, 336 | 24.1 | 3.7% | 556, 992, 336 | 67.5 | 9.2% | 11 |
| 55 | FRAP1 | 8018 | 117, 337 | 41.1 | 9.1% | 557, 776, 337 | 19.8 | 3.3% | 557, 993, 337 | 41.8 | 9.6% | 12 |
| 56 | FRAP1 | 8102 | 118, 338 | 35.7 | 5.1% | 558, 777, 338 | 30.2 | 6.3% | 558, 994, 338 | 39.5 | 9.9% | 12 |
| 57 | FRAP1 | 8177 | 119, 339 | 21.2 | 3.9% | 559, 778, 339 | 33.2 | 9.3% | 559, 995, 339 | 47.3 | 12.3% | 14 |
| 58 | FRAP1 | 8348 | 120, 340 | 25.8 | 3.6% | 560, 779, 340 | 26.8 | 4.4% | 560, 996, 340 | 37.4 | 4.7% | 11 |
| 59 | FRAP1 | 8435 | 121, 341 | 41.1 | 6.7% | 561, 780, 341 | 54.1 | 9.5% | 561, 997, 341 | 74.9 | 8.5% | 12 |
| 60 | FRAP1 | 8542 | 122, 342 | 23.1 | 4.8% | 562, 781, 342 | 16.5 | 5.5% | 562, 998, 342 | 33.6 | 6.4% | 10 |
| 61 | HIF1A | 1780 | 123, 343 | 76.6 | 14.9% | 563, 782, 343 | 89.2 | 11.9% | 563, 999, 343 | 86.3 | 9.3% | 12 |
| 62 | HIF1A | 1831 | 124, 344 | 9.0 | 0.6% | 564, 783, 344 | 14.0 | 2.3% | 564, 1000, 344 | 38.2 | 8.5% | 12 |
| 63 | HIF1A | 1870 | 125, 345 | 21.4 | 4.5% | 565, 784, 345 | 21.2 | 3.3% | 565, 1001, 345 | 19.6 | 2.2% | 13 |
| 64 | HIF1A | 1941 | 126, 346 | 8.9 | 2.1% | 566, 785, 346 | 11.4 | 2.2% | 566, 1002, 346 | 11.7 | 2.5% | 12 |
| 65 | HIF1A | 2068 | 127, 347 | 7.8 | 1.5% | 567, 786, 347 | 7.0 | 1.4% | 567, 1003, 347 | 16.9 | 3.9% | 12 |
| 66 | HIF1A | 2133 | 128, 348 | 13.0 | 2.0% | 568, 787, 348 | 16.7 | 3.1% | 568, 1004, 348 | 16.3 | 3.1% | 10 |
| 67 | HIF1A | 2232 | 129, 349 | 8.6 | 2.0% | 569, 788, 349 | 17.4 | 3.6% | 569, 1005, 349 | 37.8 | 9.6% | 13 |
| 68 | HIF1A | 2273 | 130, 350 | 19.1 | 5.3% | 570, 789, 350 | 23.4 | 4.4% | 570, 1006, 350 | 20.3 | 3.4% | 12 |
| 69 | HIF1A | 2437 | 131, 351 | 8.2 | 1.4% | 571, 790, 351 | 47.7 | 11.5% | 571, 1007, 351 | 72.4 | 14.3% | 13 |
| 70 | HIF1A | 2607 | 132, 352 | 8.0 | 2.1% | 572, 791, 352 | 11.0 | 1.2% | 572, 1008, 352 | 33.6 | 6.0% | 13 |
| 71 | IL17A | 923 | 133, 353 | 5.0 | 0.6% | 573, 792, 353 | 7.3 | 0.7% | 573, 1009, 353 | 26.3 | 2.5% | 12 |
| 72 | IL17A | 962 | 134, 354 | 6.7 | 0.8% | 574, 793, 354 | 7.7 | 0.9% | 574, 1010, 354 | 8.9 | 2.0% | 13 |
| 73 | IL17A | 969 | 135, 355 | 8.9 | 1.7% | 575, 794, 355 | 17.1 | 1.6% | 575, 1011, 355 | 49.5 | 4.3% | 14 |
| 74 | IL17A | 1098 | 136, 356 | 7.2 | 1.3% | 576, 795, 356 | 10.0 | 2.4% | 576, 1012, 356 | 15.4 | 2.8% | 12 |
| 75 | IL17A | 1201 | 137, 357 | 14.1 | 2.2% | 577, 796, 357 | 13.4 | 1.1% | 577, 1013, 357 | 17.2 | 2.8% | 12 |
| 76 | IL17A | 1433 | 138, 358 | 107.1 | 9.7% | 578, 797, 358 | 111.5 | 10.4% | 578, 1014, 358 | 108.1 | 8.8% | 13 |
| 77 | IL17A | 1455 | 139, 359 | 115.4 | 11.1% | 579, 798, 359 | 120.8 | 8.7% | 579, 1015, 359 | 120.3 | 9.9% | 12 |
| 78 | IL17A | 1478 | 140, 360 | 82.7 | 6.3% | 580, 799, 360 | 87.6 | 5.0% | 580, 1016, 360 | 95.9 | 5.6% | 14 |
| 79 | IL17A | 1663 | 141, 361 | 140.2 | 7.8% | 581, 800, 361 | 125.9 | 9.8% | 581, 1017, 361 | 114.7 | 10.1% | 14 |
| 80 | IL17A | 1764 | 142, 362 | 114.3 | 9.2% | 582, 801, 362 | 109.4 | 2.9% | 582, 1018, 362 | 105.7 | 8.1% | 15 |
| 81 | IL18 | 210 | 143, 363 | 13.8 | 2.8% | 583, 802, 363 | 23.9 | 5.8% | 583, 1019, 363 | 21.4 | 5.7% | 14 |
| 82 | IL18 | 368 | 144, 364 | 22.5 | 1.8% | 584, 803, 364 | 21.0 | 2.0% | 584, 1020, 364 | 29.7 | 3.7% | 13 |
| 83 | IL18 | 479 | 145, 365 | 88.1 | 12.9% | 585, 804, 365 | 66.3 | 9.8% | 585, 1021, 365 | 80.0 | 16.8% | 14 |
| 84 | IL18 | 508 | 146, 366 | 8.0 | 1.9% | 586, 805, 366 | 15.7 | 3.5% | 586, 1022, 366 | 17.0 | 5.7% | 12 |
| 85 | IL18 | 521 | 147, 367 | 9.9 | 2.1% | 587, 806, 367 | 10.8 | 2.1% | 587, 1023, 367 | 18.4 | 3.3% | 11 |
| 86 | IL18 | 573 | 148, 368 | 18.6 | 4.7% | 588, 807, 368 | 24.8 | 7.6% | 588, 1024, 368 | 48.8 | 7.7% | 14 |
| 87 | IL18 | 605 | 149, 369 | 27.5 | 6.1% | 589, 808, 369 | 21.3 | 3.9% | 589, 1025, 369 | 14.9 | 2.7% | 13 |
| 88 | IL18 | 663 | 150, 370 | 5.3 | 1.0% | 590, 809, 370 | 8.2 | 1.5% | 590, 1026, 370 | 11.7 | 3.4% | 12 |
| 89 | IL18 | 785 | 151, 371 | 8.6 | 1.0% | 591, 810, 371 | 11.7 | 2.8% | 591, 1027, 371 | 21.1 | 9.1% | 12 |
| 90 | IL18 | 918 | 152, 372 | 13.9 | 1.6% | 592, 811, 372 | 15.0 | 3.0% | 592, 1028, 372 | 30.4 | 3.6% | 11 |
| 91 | IL6 | 24 | 153, 373 | 22.6 | 1.7% | 593, 812, 373 | 45.7 | 7.8% | 593, 1029, 373 | 47.8 | 4.5% | 13 |
| 92 | IL6 | 74 | 154, 374 | 52.5 | 12.6% | 594, 813, 374 | 56.4 | 7.1% | 594, 1030, 374 | 88.3 | 15.5% | 12 |
| 93 | IL6 | 160 | 155, 375 | 49.8 | 7.8% | 595, 814, 375 | 50.6 | 6.1% | 595, 1031, 375 | 68.3 | 9.4% | 14 |
| 94 | IL6 | 370 | 156, 376 | 44.7 | 8.2% | 596, 815, 376 | 52.5 | 4.2% | 596, 1032, 376 | 74.3 | 9.3% | 13 |
| 95 | IL6 | 451 | 157, 377 | 39.3 | 5.0% | 597, 816, 377 | 35.6 | 4.1% | 597, 1033, 377 | 66.6 | 7.1% | 13 |
| 96 | IL6 | 481 | 158, 378 | 68.3 | 8.1% | 598, 817, 378 | 78.7 | 15.6% | 598, 1034, 378 | 63.2 | 6.2% | 11 |
| 97 | IL6 | 710 | 159, 379 | 29.2 | 4.2% | 599, 818, 379 | 32.0 | 4.1% | 599, 1035, 379 | 77.3 | 11.4% | 12 |
| 98 | IL6 | 822 | 160, 380 | 73.7 | 11.0% | 600, 819, 380 | 72.2 | 11.6% | 600, 1036, 380 | 85.2 | 13.3% | 12 |
| 99 | IL6 | 836 | 161, 381 | 98.8 | 21.8% | 601, 820, 381 | 95.0 | 13.2% | 601, 1037, 381 | 90.5 | 15.6% | 13 |
| 100 | IL6 | 960 | 162, 382 | 31.1 | 4.4% | 602, 821, 382 | 20.5 | 6.1% | 602, 1038, 382 | 25.6 | 2.4% | 12 |
| 101 | MAP2K1 | 1237 | 163, 383 | 21.0 | 3.3% | 603, 822, 383 | 27.9 | 3.8% | 603, 1039, 383 | 50.0 | 8.8% | 11 |
| 102 | MAP2K1 | 1342 | 164, 384 | 3.9 | 0.5% | 604, 823, 384 | 8.7 | 1.5% | 604, 1040, 384 | 11.4 | 1.3% | 13 |
| 103 | MAP2K1 | 1501 | 165, 385 | 12.9 | 1.9% | 605, 824, 385 | 19.4 | 2.9% | 605, 1041, 385 | 19.7 | 5.3% | 12 |
| 104 | MAP2K1 | 1542 | 166, 386 | 7.2 | 1.3% | 606, 825, 386 | 11.7 | 2.1% | 606, 1042, 386 | 18.7 | 3.2% | 11 |
| 105 | MAP2K1 | 1544 | 167, 387 | 13.1 | 2.1% | 607, 826, 387 | 11.1 | 1.1% | 607, 1043, 387 | 16.5 | 3.0% | 10 |
| 106 | MAP2K1 | 1728 | 168, 388 | 11.9 | 1.7% | 608, 827, 388 | 11.9 | 1.0% | 608, 1044, 388 | 27.9 | 4.3% | 13 |
| 107 | MAP2K1 | 1777 | 169, 389 | 18.3 | 2.8% | 609, 828, 389 | 37.2 | 4.3% | 609, 1045, 389 | 64.5 | 8.5% | 13 |
| 108 | MAP2K1 | 1892 | 170, 390 | 34.5 | 4.7% | 610, 829, 390 | 37.6 | 6.8% | 610, 1046, 390 | 42.4 | 7.3% | 12 |
| 109 | MAP2K1 | 1954 | 171, 391 | 4.6 | 0.5% | 611, 830, 391 | 4.2 | 0.5% | 611, 1047, 391 | 6.5 | 1.1% | 13 |
| 110 | MAP2K1 | 2062 | 172, 392 | 10.2 | 0.8% | 612, 831, 392 | 10.4 | 2.9% | 612, 1048, 392 | 12.2 | 2.0% | 12 |
| 111 | MAPK1 | 3683 | 173, 393 | 7.0 | 0.9% | 613, 614, 393 | 24.4 | 17.3% | 613, 1049, 393 | 25.2 | 2.6% | 12 |
| 112 | MAPK1 | 3695 | 174, 394 | 32.9 | 4.6% | 614, 832, 394 | 30.9 | 4.0% | 614, 1050, 394 | 33.8 | 3.1% | 13 |
| 113 | MAPK1 | 3797 | 175, 395 | 7.4 | 1.1% | 615, 833, 395 | 6.4 | 1.3% | 615, 1051, 395 | 40.4 | 5.8% | 11 |
| 114 | MAPK1 | 3905 | 176, 396 | 8.0 | 1.0% | 616, 834, 396 | 8.1 | 0.5% | 616, 1052, 396 | 14.8 | 1.4% | 12 |
| 115 | MAPK1 | 3916 | 177, 397 | 11.0 | 1.7% | 617, 835, 397 | 16.0 | 3.3% | 617, 1053, 397 | 45.5 | 8.1% | 10 |
| 116 | MAPK1 | 3943 | 178, 398 | 6.8 | 0.8% | 618, 836, 398 | 6.6 | 0.7% | 618, 1054, 398 | 11.0 | 2.3% | 10 |
| 117 | MAPK1 | 4121 | 179, 399 | 7.6 | 1.1% | 619, 837, 399 | 12.7 | 1.6% | 619, 1055, 399 | 25.1 | 3.1% | 12 |
| 118 | MAPK1 | 4256 | 180, 400 | 27.6 | 2.5% | 620, 838, 400 | 36.8 | 4.0% | 620, 1056, 400 | 57.7 | 7.0% | 13 |
| 119 | MAPK1 | 4294 | 181, 401 | 31.0 | 3.0% | 621, 839, 401 | 22.3 | 3.6% | 621, 1057, 401 | 50.9 | 4.6% | 12 |
| 120 | MAPK1 | 4375 | 182, 402 | 10.9 | 1.1% | 622, 840, 402 | 12.4 | 1.4% | 622, 1058, 402 | 16.9 | 2.7% | 11 |
| 121 | MAPK14 | 2715 | 183, 403 | 11.4 | 2.8% | 623, 841, 403 | 16.5 | 4.1% | 623, 1059, 403 | 16.6 | 2.4% | 12 |
| 122 | MAPK14 | 2737 | 184, 404 | 7.5 | 0.8% | 624, 842, 404 | 10.3 | 1.1% | 624, 1060, 404 | 13.1 | 1.2% | 11 |
| 123 | MAPK14 | 2750 | 185, 405 | 8.7 | 1.0% | 625, 843, 405 | 12.2 | 1.8% | 625, 1061, 405 | 15.8 | 1.9% | 13 |
| 124 | MAPK14 | 2817 | 186, 406 | 6.4 | 0.8% | 626, 844, 406 | 14.6 | 1.7% | 626, 1062, 406 | 19.4 | 2.0% | 11 |
| 125 | MAPK14 | 3091 | 187, 407 | 9.9 | 0.6% | 627, 845, 407 | 10.3 | 1.3% | 627, 1063, 407 | 24.7 | 1.5% | 11 |
| 126 | MAPK14 | 3312 | 188, 408 | 20.4 | 1.8% | 628, 846, 408 | 30.5 | 2.9% | 628, 1064, 408 | 38.5 | 3.4% | 13 |
| 127 | MAPK14 | 3346 | 189, 409 | 20.9 | 1.6% | 629, 847, 409 | 23.0 | 2.6% | 629, 1065, 409 | 58.3 | 6.7% | 11 |
| 128 | MAPK14 | 3531 | 190, 410 | 42.4 | 3.2% | 630, 848, 410 | 55.1 | 5.0% | 630, 1066, 410 | 61.9 | 3.6% | 12 |
| 129 | MAPK14 | 3621 | 191, 411 | 28.6 | 1.9% | 631, 849, 411 | 42.4 | 13.5% | 631, 1067, 411 | 71.9 | 5.2% | 11 |
| 130 | MAPK14 | 3680 | 192, 412 | 15.6 | 1.3% | 632, 850, 412 | 15.5 | 1.9% | 632, 1068, 412 | 19.8 | 2.1% | 12 |
| 131 | PDGFA | 1322 | 193, 413 | 23.7 | 3.6% | 633, 851, 413 | 31.6 | 4.3% | 633, 1069, 413 | 38.4 | 3.3% | 12 |
| 132 | PDGFA | 1332 | 194, 414 | 35.5 | 5.4% | 634, 852, 414 | 48.4 | 3.0% | 634, 1070, 414 | 65.4 | 10.5% | 14 |
| 133 | PDGFA | 1395 | 195, 415 | 25.9 | 3.3% | 635, 853, 415 | 40.2 | 6.0% | 635, 1071, 415 | 55.2 | 9.8% | 14 |
| 134 | PDGFA | 1669 | 196, 416 | 40.4 | 5.1% | 636, 854, 416 | 29.5 | 4.3% | 636, 1072, 416 | 33.9 | 5.9% | 12 |
| 135 | PDGFA | 1676 | 197, 417 | 27.1 | 2.5% | 637, 855, 417 | 36.8 | 4.5% | 637, 1073, 417 | 47.4 | 3.4% | 13 |
| 136 | PDGFA | 1748 | 198, 418 | 27.4 | 4.7% | 638, 856, 418 | 34.5 | 5.0% | 638, 1074, 418 | 47.5 | 4.7% | 11 |
| 137 | PDGFA | 2020 | 199, 419 | 31.6 | 6.6% | 639, 857, 419 | 37.5 | 4.3% | 639, 1075, 419 | 51.9 | 5.0% | 13 |
| 138 | PDGFA | 2021 | 200, 420 | 16.7 | 1.0% | 640, 858, 420 | 24.2 | 3.1% | 640, 1076, 420 | 62.6 | 6.9% | 14 |
| 139 | PDGFA | 2030 | 201, 421 | 38.7 | 6.2% | 641, 859, 421 | 47.0 | 10.5% | 641, 1077, 421 | 80.5 | 7.6% | 13 |
| 140 | PDGFA | 2300 | 202, 422 | 55.3 | 7.7% | 642, 860, 422 | 41.2 | 4.7% | 642, 1078, 422 | 71.7 | 9.1% | 15 |
| 141 | PDGFRA | 4837 | 203, 423 | 16.9 | 3.1% | 643, 861, 423 | 21.1 | 5.1% | 643, 1079, 423 | 23.1 | 4.8% | 12 |
| 142 | PDGFRA | 4900 | 204, 424 | 23.8 | 3.8% | 644, 862, 424 | 40.9 | 8.4% | 644, 1080, 424 | 62.5 | 12.5% | 16 |
| 143 | PDGFRA | 5007 | 205, 425 | 52.6 | 9.4% | 645, 863, 425 | 49.6 | 7.7% | 645, 1081, 425 | 47.0 | 9.5% | 12 |
| 144 | PDGFRA | 5043 | 206, 426 | 30.1 | 7.9% | 646, 864, 426 | 30.0 | 5.4% | 646, 1082, 426 | 57.3 | 7.8% | 11 |
| 145 | PDGFRA | 5082 | 207, 427 | 8.3 | 1.1% | 647, 865, 427 | 11.9 | 1.8% | 647, 1083, 427 | 18.2 | 4.0% | 13 |
| 146 | PDGFRA | 5352 | 208, 428 | 6.3 | 1.4% | 648, 866, 428 | 8.2 | 1.6% | 648, 1084, 428 | 7.9 | 1.1% | 12 |
| 147 | PDGFRA | 5367 | 209, 429 | 19.1 | 5.6% | 649, 867, 429 | 10.9 | 1.6% | 649, 1085, 429 | 25.1 | 2.9% | 14 |
| 148 | PDGFRA | 5496 | 210, 430 | 18.9 | 5.4% | 650, 868, 430 | 17.0 | 2.9% | 650, 1086, 430 | 17.8 | 4.0% | 12 |
| 149 | PDGFRA | 5706 | 211, 431 | 24.5 | 4.0% | 651, 869, 431 | 47.8 | 4.3% | 651, 1087, 431 | 50.6 | 5.5% | 13 |
| 150 | PDGFRA | 5779 | 212, 432 | 13.0 | 1.4% | 652, 870, 432 | 14.0 | 2.1% | 652, 1088, 432 | 17.2 | 4.3% | 14 |
| 151 | PIK3CA | 213 | 213, 433 | 4.3 | 1.0% | 653, 871, 433 | 3.7 | 0.6% | 653, 1089, 433 | 5.7 | 0.9% | 12 |
| 152 | PIK3CA | 389 | 214, 434 | 5.3 | 1.0% | 654, 872, 434 | 7.0 | 1.5% | 654, 1090, 434 | 5.6 | 1.5% | 10 |
| 153 | PIK3CA | 517 | 215, 435 | 9.6 | 1.1% | 655, 873, 435 | 11.5 | 2.1% | 655, 1091, 435 | 13.5 | 1.6% | 11 |
| 154 | PIK3CA | 630 | 216, 436 | 6.1 | 1.2% | 656, 874, 436 | 8.9 | 2.6% | 656, 1092, 436 | 9.3 | 1.8% | 12 |
| 155 | PIK3CA | 680 | 217, 437 | 3.8 | 0.3% | 657, 875, 437 | 5.9 | 0.6% | 657, 1093, 437 | 6.9 | 1.0% | 11 |
| 156 | PIK3CA | 732 | 218, 438 | 5.7 | 1.7% | 658, 876, 438 | 15.3 | 1.5% | 658, 1094, 438 | 17.4 | 4.0% | 11 |
| 157 | PIK3CA | 736 | 219, 439 | 5.9 | 0.9% | 659, 877, 439 | 7.8 | 1.1% | 659, 1095, 439 | 6.5 | 1.4% | 12 |
| 158 | PIK3CA | 923 | 220, 440 | 5.0 | 0.7% | 660, 878, 440 | 8.5 | 1.5% | 660, 1096, 440 | 7.4 | 0.6% | 12 |
| 159 | PIK3CA | 1087 | 221, 441 | 8.1 | 2.3% | 661, 879, 441 | 8.5 | 1.6% | 661, 1097, 441 | 17.5 | 4.9% | 12 |
| 160 | PIK3CA | 1094 | 222, 442 | 13.0 | 3.8% | 662, 880, 442 | 13.0 | 2.5% | 662, 1098, 442 | 30.1 | 6.4% | 11 |
| 161 | PKN3 | 2408 | 223, 443 | 9.4 | 2.1% | 663, 881, 443 | 15.2 | 3.7% | 663, 665, 443 | 32.1 | 6.6% | 12 |
| 162 | PKN3 | 2420 | 224, 444 | 14.5 | 1.7% | 664, 882, 444 | 30.4 | 7.5% | 664, 1099, 444 | 40.1 | 6.7% | 12 |
| 163 | PKN3 | 2421 | 225, 445 | 15.2 | 2.0% | 665, 883, 445 | 20.6 | 2.7% | 665, 1100, 445 | 50.8 | 7.8% | 12 |
| 164 | PKN3 | 2425 | 226, 446 | 28.4 | 3.8% | 666, 884, 446 | 27.0 | 6.9% | 666, 1101, 446 | 36.2 | 4.8% | 15 |
| 165 | PKN3 | 2682 | 227, 447 | 30.0 | 4.6% | 667, 885, 447 | 27.1 | 2.8% | 667, 1102, 447 | 37.1 | 6.2% | 11 |
| 166 | PKN3 | 2683 | 228, 448 | 22.4 | 2.8% | 668, 886, 448 | 34.8 | 2.2% | 668, 1103, 448 | 51.9 | 7.4% | 12 |
| 167 | PKN3 | 2931 | 229, 449 | 35.1 | 4.4% | 669, 887, 449 | 57.3 | 7.8% | 669, 1104, 449 | 88.6 | 7.1% | 13 |
| 168 | PKN3 | 3063 | 230, 450 | 21.8 | 3.1% | 670, 888, 450 | 28.6 | 8.5% | 670, 1105, 450 | 40.5 | 6.2% | 12 |
| 169 | PKN3 | 3314 | 231, 451 | 9.7 | 1.8% | 671, 889, 451 | 12.0 | 1.4% | 671, 1106, 451 | 17.3 | 1.3% | 10 |
| 170 | PKN3 | 3315 | 232, 452 | 10.1 | 1.3% | 672, 890, 452 | 15.3 | 2.8% | 672, 1107, 452 | 37.4 | 3.6% | 11 |
| 171 | RAF1 | 1509 | 233, 453 | 46.2 | 9.4% | 673, 891, 453 | 51.3 | 10.7% | 673, 1108, 453 | 61.3 | 4.4% | 12 |
| 172 | RAF1 | 1512 | 234, 454 | 40.1 | 9.7% | 674, 892, 454 | 34.5 | 5.6% | 674, 1109, 454 | 62.4 | 8.6% | 13 |
| 173 | RAF1 | 1628 | 235, 455 | 48.3 | 7.9% | 675, 893, 455 | 47.4 | 7.1% | 675, 1110, 455 | 41.1 | 5.1% | 12 |
| 174 | RAF1 | 1645 | 236, 456 | 38.9 | 2.3% | 676, 894, 456 | 62.1 | 9.0% | 676, 1111, 456 | 85.0 | 9.3% | 13 |
| 175 | RAF1 | 1780 | 237, 457 | 22.6 | 4.9% | 677, 895, 457 | 24.8 | 5.3% | 677, 1112, 457 | 37.6 | 10.4% | 12 |
| 176 | RAF1 | 1799 | 238, 458 | 23.2 | 3.1% | 678, 896, 458 | 43.6 | 7.6% | 678, 1113, 458 | 50.7 | 6.2% | 12 |
| 177 | RAF1 | 1807 | 239, 459 | 28.0 | 5.4% | 679, 897, 459 | 34.8 | 5.8% | 679, 1114, 459 | 37.0 | 5.3% | 15 |
| 178 | RAF1 | 1863 | 240, 460 | 28.2 | 3.1% | 680, 898, 460 | 38.1 | 4.5% | 680, 1115, 460 | 35.7 | 4.2% | 14 |
| 179 | RAF1 | 2157 | 241, 461 | 68.8 | 6.5% | 681, 899, 461 | 64.1 | 8.0% | 681, 1116, 461 | 86.7 | 12.6% | 14 |
| 180 | RAF1 | 2252 | 242, 462 | 11.4 | 1.7% | 682, 900, 462 | 25.8 | 5.4% | 682, 1117, 462 | 71.2 | 10.7% | 13 |
| 181 | SRD5A1 | 1150 | 243, 463 | 3.7 | 0.5% | 683, 901, 463 | 4.4 | 0.7% | 683, 1118, 463 | 3.8 | 0.4% | 12 |
| 182 | SRD5A1 | 1153 | 244, 464 | 3.2 | 0.4% | 684, 902, 464 | 5.2 | 0.5% | 684, 1119, 464 | 7.0 | 0.9% | 12 |
| 183 | SRD5A1 | 1845 | 245, 465 | 3.9 | 0.5% | 685, 903, 465 | 4.5 | 0.6% | 685, 1120, 465 | 7.4 | 0.8% | 13 |
| 184 | SRD5A1 | 1917 | 246, 466 | 9.4 | 0.8% | 686, 904, 466 | 10.2 | 1.3% | 686, 1121, 466 | 22.0 | 2.8% | 12 |
| 185 | SRD5A1 | 1920 | 247, 467 | 4.6 | 0.3% | 687, 905, 467 | 4.9 | 1.0% | 687, 1122, 467 | 6.4 | 0.5% | 11 |
| 186 | SRD5A1 | 1964 | 248, 468 | 6.2 | 0.7% | 688, 906, 468 | 10.4 | 0.7% | 688, 1123, 468 | 21.0 | 4.6% | 10 |
| 187 | SRD5A1 | 1981 | 249, 469 | 6.5 | 1.0% | 689, 907, 469 | 7.1 | 0.7% | 689, 1124, 469 | 8.8 | 1.5% | 12 |
| 188 | SRD5A1 | 2084 | 250, 470 | 16.9 | 1.1% | 690, 908, 470 | 15.7 | 1.5% | 690, 1125, 470 | 13.3 | 1.5% | 12 |
| 189 | SRD5A1 | 2085 | 251, 471 | 17.3 | 1.6% | 691, 909, 471 | 19.4 | 1.7% | 691, 1126, 471 | 20.8 | 2.6% | 12 |
| 190 | SRD5A1 | 2103 | 252, 472 | 7.5 | 1.3% | 692, 910, 472 | 10.9 | 1.2% | 692, 1127, 472 | 12.3 | 1.7% | 12 |
| 191 | TNF | 32 | 253, 473 | 71.4 | 13.2% | 693, 911, 473 | 93.7 | 14.9% | 693, 1128, 473 | 122.6 | 21.1% | 12 |
| 192 | TNF | 649 | 254, 474 | 100.0 | 16.3% | 694, 912, 474 | 127.7 | 12.6% | 694, 1129, 474 | 147.9 | 21.7% | 12 |
| 193 | TNF | 802 | 255, 475 | 67.2 | 10.7% | 695, 913, 475 | 64.0 | 6.6% | 695, 1130, 475 | 116.4 | 21.0% | 12 |
| 194 | TNF | 875 | 256, 476 | 101.7 | 19.9% | 696, 914, 476 | 99.3 | 15.5% | 696, 1131, 476 | 108.8 | 14.2% | 12 |
| 195 | TNF | 983 | 257, 477 | 94.5 | 7.0% | 697, 915, 477 | 83.1 | 7.3% | 697, 1132, 477 | 140.6 | 20.4% | 11 |
| 196 | TNF | 987 | 258, 478 | 82.0 | 10.9% | 698, 916, 478 | 139.4 | 8.2% | 698, 1133, 478 | 143.8 | 9.2% | 10 |
| 197 | TNF | 992 | 259, 479 | 126.7 | 15.8% | 699, 700, 479 | 121.7 | 10.8% | 699, 1134, 479 | 115.9 | 16.4% | 11 |
| 198 | TNF | 1003 | 260, 480 | 123.4 | 16.7% | 700, 917, 480 | 114.4 | 47.8% | 700, 1135, 480 | 98.5 | 17.2% | 14 |
| 199 | TNF | 1630 | 261, 481 | 58.0 | 5.7% | 701, 918, 481 | 56.1 | 9.4% | 701, 1136, 481 | 71.0 | 17.2% | 11 |
| 200 | TNF | 1631 | 262, 482 | 54.2 | 13.4% | 702, 919, 482 | 63.9 | 10.1% | 702, 1137, 482 | 73.8 | 14.8% | 11 |
| 201 | TNFSF13B | 188 | 263, 483 | 20.4 | 3.2% | 703, 920, 483 | 46.2 | 11.9% | 703, 1138, 483 | 58.4 | 12.7% | 13 |
| 202 | TNFSF13B | 313 | 264, 484 | 15.9 | 5.1% | 704, 921, 484 | 18.9 | 7.4% | 704, 1139, 484 | 48.0 | 8.1% | 12 |
| 203 | TNFSF13B | 337 | 265, 485 | 22.3 | 4.6% | 705, 922, 485 | 37.1 | 11.0% | 705, 1140, 485 | 63.6 | 10.4% | 12 |
| 204 | TNFSF13B | 590 | 266, 486 | 35.8 | 8.7% | 706, 923, 486 | 49.4 | 11.0% | 706, 1141, 486 | 50.7 | 10.3% | 10 |
| 205 | TNFSF13B | 652 | 267, 487 | 21.3 | 7.2% | 707, 924, 487 | 57.6 | 16.7% | 707, 1142, 487 | 78.8 | 5.6% | 14 |
| 206 | TNFSF13B | 661 | 268, 488 | 28.8 | 3.0% | 708, 925, 488 | 38.3 | 8.4% | 708, 1143, 488 | 56.5 | 16.3% | 12 |
| 207 | TNFSF13B | 684 | 269, 489 | 46.3 | 7.2% | 709, 926, 489 | 43.8 | 9.7% | 709, 1144, 489 | 54.5 | 4.6% | 12 |
| 208 | TNFSF13B | 905 | 270, 490 | 18.5 | 5.0% | 710, 927, 490 | 27.9 | 3.1% | 710, 1145, 490 | 51.7 | 10.9% | 12 |
| 209 | TNFSF13B | 961 | 271, 491 | 21.4 | 4.0% | 711, 928, 491 | 37.5 | 10.1% | 711, 1146, 491 | 77.6 | 11.2% | 14 |
| 210 | TNFSF13B | 1150 | 272, 492 | 24.1 | 7.0% | 712, 929, 492 | 23.4 | 5.7% | 712, 1147, 492 | 35.9 | 8.0% | 13 |
| 211 | VEGFA | 1426 | 273, 493 | 14.5 | 2.2% | 713, 930, 493 | 18.1 | 3.2% | 713, 1148, 493 | 21.0 | 3.8% | 13 |
| 212 | VEGFA | 1428 | 274, 494 | 18.5 | 2.6% | 714, 931, 494 | 32.1 | 5.8% | 714, 1149, 494 | 46.7 | 9.4% | 12 |
| 213 | VEGFA | 1603 | 275, 495 | 14.6 | 2.1% | 715, 932, 495 | 36.6 | 17.5% | 715, 1150, 495 | 65.6 | 6.9% | 13 |
| 214 | VEGFA | 1685 | 276, 496 | 17.1 | 1.3% | 716, 933, 496 | 20.2 | 5.5% | 716, 1151, 496 | 23.4 | 3.8% | 13 |
| 215 | VEGFA | 1792 | 277, 497 | 17.0 | 1.8% | 717, 934, 497 | 21.2 | 3.2% | 717, 1152, 497 | 39.5 | 6.3% | 12 |
| 216 | VEGFA | 2100 | 278, 498 | 116.9 | 11.5% | 718, 935, 498 | 103.6 | 7.5% | 718, 1153, 498 | 101.5 | 12.9% | 12 |
| 217 | VEGFA | 2102 | 279, 499 | 116.3 | 9.1% | 719, 936, 499 | 110.2 | 9.3% | 719, 1154, 499 | 105.0 | 8.0% | 12 |
| 218 | VEGFA | 2196 | 280, 500 | 24.2 | 2.7% | 720, 937, 500 | 26.6 | 3.1% | 720, 1155, 500 | 43.5 | 3.5% | 12 |
| 219 | VEGFA | 2261 | 281, 501 | 15.6 | 2.2% | 721, 938, 501 | 44.2 | 6.2% | 721, 1156, 501 | 109.0 | 9.8% | 12 |
| 220 | VEGFA | 2292 | 282, 502 | 48.4 | 4.3% | 722, 939, 502 | 45.1 | 7.2% | 722, 1157, 502 | 80.7 | 6.7% | 15 |

*All samples were normalized to the respective dsRNA QNeg (Qiagen) negative control samples run in the same experiment. That is, QNeg values were set as 100% active (i.e., no knockdown), with 95% confidence intervals (CI) ranging from 6.3-22.5%. As a positive control, an siRNA specific for rLuc was used, which samples showed on average expression levels that varied from 1.2% to 16.8% (i.e., about 83% to about 99% knockdown activity and a 95% CI ranging from 0.3% to 13.7%).
†“Pos” refers to the position on the target gene mRNA message that aligns with the 5′-end of the dsRNA sense strand. The mRNA numbering is based on the GenBank accession numbers as described herein.
‡The SEQ ID NOS. are provided in the following order: (1) Dicer: sense strand, antisense strand; (2) Nicked: 5′-sense strand fragment, 3′-sense strand fragment, and antisense strand; and (3) Gapped: 5′-sense strand fragment, 3′-sense strand fragment, and antisense strand. The Dicer dsRNA has two strands, while ndsRNA and gdsRNA have three strands each. The nicked or gapped sense strand fragments have three locked nucleic acids each.
\hat{ }“Length 5′-S” refers to the length of the 5′-sense strand fragment of the nicked or gapped mdRNA, which indicates the position of the nick (e.g., 10 means the nick is between position 10 and 11, so the 5′sense strand fragment is 10 nucleotides long and the 3′-sense strand fragment is 15 nucelotides long) or one nucleotide gap (e.g., 10 means the missing nucleotide is number 11, so the 5′ sense strand fragment is 10 nucleotides long and the 3′-sense strand fragment is 14 nucelotides long).

### Example 2

### Knockdown of β-Galactosidase Activity by Gapped dsRNA Dicer Substrate

[0189] The activity of a Dicer substrate dsRNA containing a gap in the double-stranded structure in silencing LacZ mRNA as compared to the normal Dicer substrate dsRNA (i.e., not having a gap) was examined.

Nucleotide Sequences of dsRNA and mdRNA Targeting LacZ mRNA

[0190] The nucleic acid sequence of the one or more sense strands, and the antisense strand of the dsRNA and gapped dsRNA (also referred to herein as a meroduplex or mdRNA) are shown below and were synthesized using standard techniques. The RISC activator LacZ dsRNA comprises a 21 nucleotide sense strand and a 21 nucleotide antisense strand, which can anneal to form a double-stranded region of 19 base pairs with a two deoxythymidine overhang on each strand (referred to as 21/21 dsRNA).

LacZ dsRNA (21/21) - RISC Activator

(SEQ ID NO:1)

| | |
|---|---|
| Sense | 5′-CUACACAAAUCAGCGAUUUdTdT-3′ |

(SEQ ID NO:2)

| | |
|---|---|
| Antisense | 3′-dTdTGAUGUGUUUAGUCGCUAAA-5′ |

[0191] The Dicer substrate LacZ dsRNA comprises a 25 nucleotide sense strand and a 27 nucleotide antisense strand, which can anneal to form a double-stranded region of 25 base pairs with one blunt end and a cytidine and uridine overhang on the other end (referred to as 25/27 dsRNA).

LacZ dsRNA (25/27) - Dicer Substrate

(SEQ ID NO:3)

| | |
|---|---|
| Sense | 5′-CUACACAAAUCAGCGAUUUCCAUdGdT-3′ |

(SEQ ID NO:4)

| | |
|---|---|
| Antisense | 3′-CUGAUGUGUUUAGUCGCUAAAGGUA C A -5′ |

The LacZ mdRNA comprises two sense strands of 13 nucleotides (5′-portion) and 11 nucleotides (3′-portion) and a 27 nucleotide antisense strand, which three strands can anneal to form two double-stranded regions of 13 and 11 base pairs separated by a single nucleotide gap (referred to as a 13, 11/27 mdRNA). The 5′-end of the 11 nucleotide sense strand fragment may be optionally phosphorylated. The “*” indicates a gap—in this case, a single nucleotide gap (i.e., a cytidine is missing).

LacZ mdRNA (13, 11/27) - Dicer Substrate

(SEQ ID NOS:5, 6)

| | |
|---|---|
| Sense | 5′-CUACACAAAUCAG*GAUUUCCAUdGdT-3′ |

(SEQ ID NO:4)

| | |
|---|---|
| Antisense | 3′-CUGAUGUGUUUAGUCGCUAAAGGUA C A -5′ |

Each of the LacZ dsRNA or mdRNA was used to transfect 9lacZ/R cells.

### Transfection

[0192] Six well collagen-coated plates were seeded with 5×10⁵ 9lacZ/R cells/well in a 2 ml volume per well, and incubated overnight at 37° C./5% CO₂ in DMEM/high glucose media. Preparation for transfection: 250 μl of OPTIMEM media without serum was mixed with 5 μl of 20 pmol/μl dsRNA and 5 μl of HIPERFECT transfection solution (Qiagen) was mixed with another 250 μl OPTIMEM media. After both mixtures were allowed to equilibrate for 5 minutes, the RNA and transfection solutions were combined and left at room temperature for 20 minutes to form transfection complexes. The final concentration of HIPERFECT was 50 μM, and the dsRNAs were tested at 0.05 nM, 0.1 nM, 0.2 nM, 0.5 nM, 1 nM, 2 nM, 5 nM, and 10 nM, while the mdRNA was tested at 0.2 nM, 0.5 nM, 1 nM, 2 nM, 5 nM, 10 nM, 20 nM, and 50 nM. Complete media was removed, the cells were washed with incomplete OPTIMEM, and then 500 μl transfection mixture was applied to the cells, which were incubated with gentle shaking at 37° C. for 4 hours. After transfecting, the transfection media was removed, cells were washed once with complete DMEM/high glucose media, fresh media added, and the cells were then incubated for 48 hours at 37° C., 5% CO₂.

### β-Galactosidase Assay

[0193] Transfected cells were washed with PBS, and then detached with 0.5 ml trypsin/EDTA. The detached cells were suspended in 1 ml complete DMEM/high glucose and transferred to a clean tube. The cells were harvested by centrifugation at 250×g for 5 minutes, and then resuspended in 50 μl 1× lysis buffer at 4° C. The lysed cells were subjected to two freeze-thaw cycles on dry ice and a 37° C. water bath. The lysed samples were centrifuged for 5 minutes at 4° C. and the supernatant was recovered. For each sample, 1.5 μl and 10 μl of lysate was transferred to a clean tube and sterile water added to a final volume of 30 μl followed by the addition of 70 μl o-nitrophenyl-β-D-galactopyranose (ONPG) and 200 PI 1× cleavage buffer with β-mercaptoethanol. The samples were mixed briefly, incubated for 30 minutes at 37° C., and then 500 μl stop buffer was added (final volume 800 μl). β-Galactosidase activity for each sample was measured in disposable cuvettes at 420 nm. Protein concentration was determined by the BCA (bicinchoninic acid) method. For the purpose of the instant example, the level of measured LacZ activity was correlated with the quantity of LacZ transcript within 9L/LacZ cells. Thus, a reduction in β-galactosidase activity after dsRNA transfection, absent a negative impact on cell viability, was attributed to a reduction in the quantity of LacZ transcripts resulting from targeted degradation mediated by the LacZ dsRNA.

### Results

[0194] Knockdown activity in transfected and untransfected cells was normalized to a Qneg control dsRNA and presented as a normalized value of the Qneg control (i.e., Qneg represented 100% or “normal” gene expression levels). Both the lacZ RISC activator and Dicer substrate dsRNAs molecule showed good knockdown of β-galactosidase activity at concentration as low as 0.1 nM (FIG. 2), while the Dicer substrate antisense strand alone (single stranded 27mer) had no silencing effect. Surprisingly, a gapped mdRNA showed good knockdown although somewhat lower than that of intact RISC activator and Dicer substrate dsRNAs (FIG. 2). The presence of the gapmer cytidine (i.e., the missing nucleotide) at various concentrations (0.1 μM to 50 μM) had no effect on the activity of the mdRNA (data not shown). None of the dsRNA or mdRNA solutions showed any detectable toxicity in the transfected 9L/LacZ cells. The IC₅₀ of the lacZ mdRNA was calculated to be 3.74 nM, which is about 10 fold lower than what had been previously measured for lacZ dsRNA 21/21 (data not shown). These results show that a meroduplex (gapped dsRNA) is capable of inducing gene silencing.

### Example 3

### Knockdown of Influenza Gene Expression by Nicked dsRNA

[0195] The activity of a nicked dsRNA (21/21) in silencing influenza gene expression as compared to a normal dsRNA (i.e., not having a nick) was examined.

Nucleotide Sequences of dsRNA and mdRNA Targeting Influenza mRNA

[0196] The dsRNA and nicked dsRNA (another form of meroduplex, referred to herein as ndsRNA) are shown below and were synthesized using standard techniques. The RISC activator influenza G1498 dsRNA comprises a 21 nucleotide sense strand and a 21 nucleotide antisense strand, which can anneal to form a double-stranded region of 19 base pairs with a two deoxythymidine overhang on each strand.

G1498-wt dsRNA (21/21)

(SEQ ID NO:7)

| | |
|---|---|
| Sense | 5′-GGAUCUUAUUUCUUCGGAGdTdT-3′ |

(SEQ ID NO:8)

| | |
|---|---|
| Antisense | 3′-dTdTCCUAGAAUAAAGAAGCCUC-5′ |

[0197] The RISC activator influenza G1498 dsRNA was nicked on the sense strand after nucleotide 11 to produce a ndsRNA having two sense strands of 11 nucleotides (5′-portion, italic) and 10 nucleotides (3′-portion) and a 21 nucleotide antisense strand, which three strands can anneal to form two double-stranded regions of 11 (shown in italics) and 10 base pairs separated by a one nucleotide gap (which may be referred to as G1498 11, 10/21 ndsRNA-wt). The 5′-end of the 10 nucleotide sense strand fragment may be optionally phosphorylated, as depicted by a “p” preceding the nucleotide (e.g., pC).

G1498 ndsRNA-wt (11, 10/21)

(SEQ ID NO:9, 10)

| | |
|---|---|
| Sense | 5′-GGAUCUUAUUUCUUCGGAGdTdT-3′ |

(SEQ ID NO:8)

| | |
|---|---|
| Antisense | 3′-dTdTCCUAGAAUAAAGAAGCCUC-5′ |

G1498 ndsRNA-wt (11, 10/21)

(SEQ ID NOS:9, 10)

| | |
|---|---|
| Sense | 5′-GGAUCUUAUUUₚCUUCGGAGdTdT-3′ |

(SEQ ID NO:8)

| | |
|---|---|
| Antisense | 3′-dTdTCCUAGAAUAAAGAAGCCUC-5′ |

In addition, each of these G1498 dsRNAs were made with each U substituted with a 5-methyluridine (ribothymidine) and are referred to as G1498 dsRNA-rT. Each of the G1498 dsRNA or ndsRNA (meroduplex), with or without the 5-methyluridine substitution, was used to transfect HeLa S3 cells having an influenza target sequence associated with a luciferase gene. Also, the G1498 antisense strand alone or the antisense strand annealed to the 11 nucleotide sense strand portion alone or the 10 nucleotide sense strand portion alone were examined for activity.

### Transfection and Dual Luciferase Assay

[0198] The reporter plasmid psiCHECK™-2 (Promega, Madison, Wis.), which constitutively expresses both firefly luc2 (Photinus pyralis) and Renilla (Renilla reniformis, also known as sea pansy) luciferases, was used to clone in a portion of the influenza NP gene downstream of the Renilla translational stop codon that results in a Renilla-influenza NP fusion mRNA. The firefly luciferase in the psiCHECK™-2 vector is used to normalize Renilla luciferase expression and serves as a control for transfection efficiency.

[0199] Multi-well plates were seeded with HeLa S3 cells/well in 100 μl Ham's F12 medium and 10% fetal bovine serum, and incubated overnight at 37° C./5% CO₂. The HeLa S3 cells were transfected with the psiCHECK™-influenza plasmid (75 ng) and G1498 dsRNA or ndsRNA (final concentration of 10 nM or 100 nM) formulated in Lipofectamine™ 2000 and OPTIMEM reduced serum medium. The transfection mixture was incubated with the HeLa S3 cells with gentle shaking at 37° C. for about 18 to 20 hours.

[0200] After transfecting, firefly luciferase reporter activity was measured first by adding Dual-Glo™ Luciferase Reagent (Promega, Madison, Wis.) for 10 minutes with shaking, and then quantitating the luminescent signal using a VICTOR³™1420 Multilabel Counter (PerkinElmer, Waltham, Mass.). After measuring the firefly luminescence, Stop & Glo® Reagent (Promega, Madison, Wis.) was added for 10 minutes with shaking to simultaneously quench the firefly reaction and initiate the Renilla luciferase reaction, and then the Renilla luciferase luminescent signal was quantitated VICTOR³™1420 Multilabel Counter (PerkinElmer, Waltham, Mass.).

### Results

[0201] Knockdown activity in transfected and untransfected cells was normalized to a Qneg control dsRNA and presented as a normalized value of the Qneg control (i.e., Qneg represented 100% or “normal” gene expression levels). Thus, a smaller value indicates a greater knockdown effect. The G1498 dsRNA-wt and dsRNA-rT showed similar good knockdown at a 100 nM concentration (FIG. 3). Surprisingly, the G1498 ndsRNA-rT, whether phosphorylated or not, showed good knockdown although somewhat lower than the G1498 dsRNA-wt (FIG. 3). Similar results were obtained with dsRNA or ndsRNA at 10 nM (data not shown). None of the G1498 dsRNA or ndsRNA solutions showed any detectable toxicity in HeLa S3 cells at either 10 nM or 100 nM. Even the presence of only half a nicked sense strand (an 11 nucleotide or 10 nucleotide strand alone) with a G1498 antisense strand showed some detectable activity. These results show that a nicked-type meroduplex dsRNA molecule is unexpectedly capable of promoting gene silencing.

### Example 4

### Knockdown Activity of Nicked mdRNA

[0202] In this example, the activity of a dicer substrate LacZ dsRNA of Example 1 having a sense strand with a nick at various positions was examined. In addition, a dideoxy nucleotide (i.e., ddG) was incorporated at the 5′-end of the 3′-most strand of a sense sequence having a nick or a single nucleotide gap to determine whether the in vivo ligation of the nicked sense strand is “rescuing” activity. The ddG is not a substrate for ligation. Also examined was the influenza dicer substrate dsRNA of Example 7 having a sense strand with a nick at one of positions 8 to 14. The “p” designation indicates that the 5′-end of the 3′-most strand of the nicked sense influenza sequence was phosphorylated. The “L” designation indicates that the G at position 2 of the 5′-most strand of the nicked sense influenza sequence was substituted for a locked nucleic acid G. The Qneg is a negative control dsRNA.

[0203] The dual fluorescence assay of Example 3 was used to measure knockdown activity with 5 nM of the LacZ sequences and 0.5 nM of the influenza sequences. The lacZ dicer substrate (25/27, LacZ-DS) and lacZ RISC activator (21/21, LacZ) are equally active, and the LacZ-DS can be nicked in any position between 8 and 14 without affecting activity (FIG. 3). In addition, the inclusion of a ddG on the 5′-end of the 3′-most LacZ sense sequence having a nick (LacZ:DSNkd13-3′dd) or a one nucleotide gap (LacZ:DSNkd13D1-3′dd) was essentially as active as the unsubstituted sequence (FIG. 4). The influenza dicer substrate (G1498DS) nicked at any one of positions 8 to 14 was also highly active (FIG. 5). Phosphorylation of the 5′-end of the 3′-most strand of the nicked sense influenza sequence had essentially no effect on activity, but addition of a locked nucleic acid appears to improve activity.

### Example 5

### Mean Inhibitory Concentration of mdRNA

[0204] In this example, a dose response assay was performed to measure the mean inhibitory concentration (IC₅₀) of the influenza dicer substrate dsRNA of Example 8 having a sense strand with a nick at position 12, 13, or 14, including or not a locked nucleic acid. The dual luciferase assay of Example 2 was used. The influenza dicer substrate dsRNA (G1498DS) was tested at 0.0004 nM, 0.002 nM, 0.005 nM, 0.019 nM, 0.067 nM, 0.233 nM, 0.816 nM, 2.8 nM, and 10 nM, while the mdRNA with a nick at position 13 (G1498DS:Nkd13) was tested at 0.001 nM, 0.048 nM, 0.167 nM, 1 nM, 2 nM, 7 nM, and 25 nM (see FIG. 6). Also tested were RISC activator molecules (21/21) with or without a nick at various positions (including G1498DS:Nkdl 1, G1498DS:Nkd12, and G1498DS:Nkd14), each of the nicked versions with a locked nucleic acid as described above (data not shown). The Qneg is a negative control dsRNA.

[0205] The IC₅₀ of the RISC activator G1498 was calculated to be about 22 μM, while the dicer substrate G1498DS IC₅₀ was calculated to be about 6 μM. The IC₅₀ of RISC and Dicer mdRNAs range from about 200 μM to about 15 nM. The inclusion of a single locked nucleic acid reduced the IC₅₀ of Dicer mdRNAs by up 4 fold (data not shown). These results show that a meroduplex dsRNA having a nick or gap in any position is capable of inducing gene silencing.

### Example 6

### Knockdown Activity of Gapped mdRNA

[0206] The activity of an influenza dicer substrate dsRNA having a sense strand with a gap of differing sizes and positions was examined. The influenza dicer substrate dsRNA of Example 8 was generated with a sense strand having a gap of 0 to 6 nucleotides at position 8, a gap of 4 nucleotides at position 9, a gap of 3 nucleotides at position 10, a gap of 2 nucleotides at position 11, and a gap of 1 nucleotide at position 12 (see Table 2). The Qneg is a negative control dsRNA. Each of the mdRNAs was tested at a concentration of 5 nM (data not shown) and 10 nM. The mdRNAs have the following antisense strand 5′-CAUUGUCUCCGAAGAAAUAAGAUCCUU (SEQ ID NO:11), and nicked or gapped sense strands as shown in Table 2.

TABLE 2

| | | | | | |
|---|---|---|---|---|---|
| | | | Gap | Gap | % |
| mdRNA | 5′ Sense* (SEQ ID NO.) | 3′ Sense (SEQ ID NO.) | Pos | Size | KD^{†} |

| | | | | | |
|---|---|---|---|---|---|
| G1498:DSNkd8 | GGAUCUUA (12) | UUUCUUCGGAGACAAdTdG (13) | 8 | 0 | 67.8 |
| G1498:DSNkd8D1 | GGAUCUUA (12) | UUCUUCGGAGACAAdTdG (14) | 8 | 1 | 60.9 |
| G1498:DSNkd8D2 | GGAUCUUA (12) | UCUUCGGAGACAAdTdG (15) | 8 | 2 | 48.2 |
| G1498:DSNkd8D3 | GGAUCUUA (12) | CUUCGGAGACAAdTdG (16) | 8 | 3 | 44.1 |
| G1498:DSNkd8D4 | GGAUCUUA (12) | UUCGGAGACAAdTdG (17) | 8 | 4 | 30.8 |
| G1498:DSNkd8D5 | GGAUCUUA (12) | UCGGAGACAAdTdG (18) | 8 | 5 | 10.8 |
| G1498:DSNkd8D6 | GGAUCUUA (12) | CGGAGACAAdTdG (19) | 8 | 6 | 17.9 |
| G1498:DSNkd9D4 | GGAUCUUAU (20) | UCGGAGACAAdTdG (18) | 9 | 4 | 38.9 |
| G1498:DSNkd10D3 | GGAUCUUAUU (21) | UCGGAGACAAdTdG (18) | 10 | 3 | 38.4 |
| G1498:DSNkd11D2 | GGAUCUUAUUU (22) | UCGGAGACAAdTdG (18) | 11 | 2 | 46.2 |
| G1498:DSNkd12D1 | GGAUCUUAUUUC (23) | UCGGAGACAAdTdG (18) | 12 | 1 | 49.6 |
| Plasmid | — | — | — | 5.3 | |

*G indicates a locked nucleic acid G in the 5′ sense strand.
^{†}% KD means percent knockdown activity.

[0207] The dual fluorescence assay of Example 2 was used to measure knockdown activity. Similar results were obtained at both the 5 nM and 10 nM concentrations. These data show that an mdRNA having a gap of up to 6 nucleotides still has activity, although having four or fewer missing nucleotides shows the best activity (see, also, FIG. 7). Thus, mdRNA having various sizes gaps that are in various different positions have knockdown activity.

[0208] To examine the general applicability of a sequence having a sense strand with a gap of differing sizes and positions, a different dsRNA sequence was tested. The lacZ RISC dsRNA of Example 1 was generated with a sense strand having a gap of 0 to 6 nucleotides at position 8, a gap of 5 nucleotides at position 9, a gap of 4 nucleotides at position 10, a gap of 3 nucleotides at position 11, a gap of 2 nucleotides at position 12, a gap of 1 nucleotide at position 12, and a nick (gap of 0) at position 14 (see Table 3). The Qneg is a negative control dsRNA. Each of the mdRNAs was tested at a concentration of 5 nM (data not shown) and 25 nM. The lacZ mdRNAs have the following antisense strand 5′-AAAUCGCUGAUUUGUGUAGdTdTUAAA (SEQ ID NO:2) and nicked or gapped sense strands as shown in Table 3.

TABLE 3

| | | | | |
|---|---|---|---|---|
| | | | Gap | Gap |
| mdRNA | 5′ Sense* (SEQ ID NO.) | 3′ Sense* (SEQ ID NO.) | Pos | Size |

| | | | | |
|---|---|---|---|---|
| LacZ:Nkd8 | CUACACAA (24) | AUCAGC GAUUUdTdT (25) | 8 | 0 |
| LacZ:Nkd8D1 | CUACACAA (24) | UCAGC GAUUUdTdT (26) | 8 | 1 |
| LacZ:Nkd8D2 | CUACACAA (24) | CAGC GAUUUdTdT (27) | 8 | 2 |
| LacZ:Nkd8D3 | CUACACAA (24) | AGC GAUUUdTdT (28) | 8 | 3 |
| LacZ:Nkd8D4 | CUACACAA (24) | GC GAUUUdTdT (29) | 8 | 4 |
| LacZ:Nkd8D5 | CUACACAA (24) | C GAUUUdTdT (30) | 8 | 5 |
| LacZ:Nkd8D6 | CUACACAA (24) | GAUUUdTdT (31) | 8 | 6 |
| LacZ:Nkd9D5 | CUACACAAA (32) | GAUUUdTdT (31) | 9 | 5 |
| LacZ:Nkd10D4 | CUACACAAAU (33) | GAUUUdTdT (31) | 10 | 4 |
| LacZ:Nkd11D3 | CUACACAAAUC (34) | GAUUUdTdT (31) | 11 | 3 |
| LacZ:Nkd12D2 | CUACACAAAUCA (35) | GAUUUdTdT (31) | 12 | 2 |
| LacZ:Nkd13D1 | CUACACAAAUCAG (36) | GAUUUdTdT (31) | 13 | 1 |
| LacZ:Nkd14 | CUACACAAAUCAGC (37) | GAUUUdTdT (31) | 14 | 0 |

8A indicates a locked nucleic acid A in each sense strand.

[0209] The dual fluorescence assay of Example 3 was used to measure knockdown activity. FIG. 8 shows that an mdRNA having a gap of up to 6 nucleotides has substantial activity and the position of the gap may affect the potency of knockdown. Thus, mdRNA having various sizes gaps that are in various different positions and in different mdRNA sequences have knockdown activity.

### Example 7

### Knockdown Activity of Substituted mdRNA

[0210] The activity of an influenza dsRNA RISC sequences having a nicked sense strand and the sense strands having locked nucleic acid substitutions were examined. The influenza RISC sequence G1498 of Example 3 was generated with a sense strand having a nick at positions 8 to 14 counting from the 5′-end. Each sense strand was substituted with one or two locked nucleic acids as shown in Table 4. The Qneg and Plasmid are negative controls. Each of the mdRNAs was tested at a concentration of 5 nM. The antisense strand used was 5′-CUCCGAAGAAAUAAGAUCCdTdT (SEQ ID NO:8).

TABLE 4

| | | | | |
|---|---|---|---|---|
| | | | Nick | % |
| mdRNA | 5′ Sense* (SEQ ID NO.) | 3′ Sense* (SEQ ID NO.) | Pos | KD |

| | | | | |
|---|---|---|---|---|
| G1498-wt | GGAUCUUAUUUCUUCGGAGdTdT (7) | — | — | 85.8 |
| G1498-L | GGAUCUUAUUUCUUCGGAGdTdT (61) | — | — | 86.8 |
| G1498:Nkd8-1 | GGAUCUUA (12) | UUUCUUCGGAGdTdT (47) | 8 | 36.0 |
| G1498:Nkd8-2 | GGAUCUUA (40) | UUUCUUCGGAGdTdT (54) 8 | 66.2 | |
| G1498:Nkd9-1 | GGAUCUUAU (20) | UUCUUCGGAGdTdT (48) | 9 | 60.9 |
| G1498:Nkd9-2 | GGAUCUUAU (41) | UUCUUCGGAGdTdT (55) | 9 | 64.4 |
| G1498:Nkd10-1 | GGAUCUUAUU (21) | UCUUCGGAGdTdT (49) | 10 | 58.2 |
| G1498:Nkd10-2 | GGAUCUUAUU (42) | UCUUCGGAGdTdT (56) | 10 | 68.5 |
| G1498:Nkd11-1 | GGAUCUUAUUU (22) | CUUCGGAGdTdT (50) | 11 | 75.9 |
| G1498:Nkd11-2 | GGAUCUUAUUU (43) | CUUCGGAGdTdT (57) | 11 | 67.1 |
| G1498:Nkd12-1 | GGAUCUUAUUUC (23) | UUCGGAGdTdT (51) | 12 | 59.9 |
| G1498:Nkd12-2 | GGAUCUUAUUUC (44) | UUCGGAGdTdT (58) | 12 | 72.8 |
| G1498:Nkd13-1 | GGAUCUUAUUUCU (38) | UCGGAGdTdT (52) | 13 | 37.1 |
| G1498:Nkd13-2 | GGAUCUUAUUUCU (45) | UCGGAGdTdT (59) | 13 | 74.3 |
| G1498:Nkd14-1 | GGAUCUUAUUUCUU (39) | CGGAGdTdT (53) | 14 | 29.0 |
| G1498:Nkd14-2 | GGAUCUUAUUUCUU (46) | CGGAGdTdT (60) | 14 | 60.2 |
| Qneg | — | — | — | 0 |
| Plasmid | — | — | — | 3.6 |

*Nucleotides that are bold and underlined are locked nucleic acids.

[0211] The dual fluorescence assay of Example 3 was used to measure knockdown activity. These data show that increasing the number of locked nucleic acid substitutions tends to increase activity of an mdRNA having a nick at any of a number of positions. The single locked nucleic acid per sense strand appears to be most active when the nick is at position 11 (see FIG. 9). But, multiple locked nucleic acids on each sense strand make mdRNA having a nick at any position as active as the most optimal nick position with a single substitution (i.e., position 11) (FIG. 9). Thus, mdRNA having duplex stabilizing modifications make mdRNA essentially equally active regardless of the nick position.

[0212] Similar results were observed when locked nucleic acid substitutions were made in the LacZ dicer substrate mdRNA of Example 2 (SEQ ID NOS:3 and 4). The lacZ dicer was nicked at positions 8 to 14, and a duplicate set of nicked LacZ dicer molecules were made with the exception that the A at position 3 (from the 5′-end) of the 5′ sense strand was substituted for a locked nucleic acid A (LNA-A). As is evident from FIG. 10, most of the nicked lacZ dicer molecules containing LNA-A were as potent in knockdown activity as the unsubstituted lacZ dicer.

### Example 7

### mdRNA Knockdown of Influenza Virus Titer

[0213] The activity of a dicer substrate nicked dsRNA in reducing influenza virus titer as compared to a wild-type dsRNA (i.e., not having a nick) was examined. The influenza dicer substrate sequence (25/27) is as follows:

(SEQ ID NO:62)

| | |
|---|---|
| Sense | 5′-GGAUCUUAUUUCUUCGGAGACAAdTdG |

(SEQ ID NO:11)

| | |
|---|---|
| Antisense | 5′-CAUUGUCUCCGAAGAAAUAAGAUCCUU |

The mdRNA sequences have a nicked sense strand after position 12, 13, and 14, respectively, as counted from the 5′-end, and the G at position 2 is substituted with locked nucleic acid G.

[0214] For the viral infectivity assay, Vero cells were seeded at 6.5×10⁴ cells/well the day before transfection in 500 μl 10% FBS/DMEM media per well. Samples of 100, 10, 1, 0.1, and 0.01 nM stock of each dsRNA were complexed with 1.0 μl (1 mg/ml stock) of Lipofectamine™ 2000 (Invitrogen, Carlsbad, Calif.) and incubated for 20 minutes at room temperature in 150 μl OPTIMEM (total volume) (Gibco, Carlsbad, Calif.). Vero cells were washed with OPTIMEM, and 150 μl of the transfection complex in OPTIMEM was then added to each well containing 150 μl of OPTIMEM media. Triplicate wells were tested for each condition. An additional control well with no transfection condition was prepared. Three hours post transfection, the media was removed. Each well was washed once with 200 μl PBS containing 0.3% BSA and 10 mM HEPES/PS. Cells in each well were infected with WSN strain of influenza virus at an MOI 0.01 in 200 μl of infection media containing 0.3% BSA/10 mM HEPES/PS and 4 μg/ml trypsin. The plate was incubated for 1 hour at 37° C. Unadsorbed virus was washed off with the 200 μl of infection media and discarded, then 400 μl DMEM containing 0.3% BSA/10 mM HEPES/PS and 4 μg/ml trypsin was added to each well. The plate was incubated at 37° C., 5% CO₂ for 48 hours, then 50 μl supernatant from each well was tested in duplicate by TCID₅₀ assays (50% Tissue-Culture Infective Dose, WHO protocol) in MDCK cells and titers were estimated using the Spearman and Karber formula. The results show that these mdRNAs show about a 50% to 60% viral titer knockdown, even at a concentration as low as 10 pM (FIG. 11).

[0215] An in vivo influenza mouse model was also used to examine the activity of a dicer substrate nicked dsRNA in reducing influenza virus titer as compared to a wild-type dsRNA (i.e., not having a nick). Female BALB/c mice (age 8-10 weeks with 5-10 mice per group) were dosed intranasally with 120 nmol/kg/day dsRNA (formulated in C12-norArg(NH₃+Cl⁻)—C12/DSPE-PEG2000/DSPC/cholesterol at a ratio of 30:1:20:49) for three consecutive days before intranasal challenge with influenza strain PR8 (20 PFU/mouse). Two days after infection, whole lungs are harvested from each mouse and placed in a solution of PBS/0.3% BSA with antibiotics, homogenize, and measure the viral titer (TCID₅₀). Doses were well tolerated by the mice, indicated by less than 2% body weight reduction in any of the dose groups. The mdRNAs tested exhibit similar, if not slightly greater, virus reduction in vivo as compared to unmodified and unnicked G1498 dicer substrate (see FIG. 12). Hence, mdRNA are active in vivo.

### Example 8

### Effect of mdRNA on Cytokine Induction

[0216] The effect of the mdRNA structure on cytokine induction in vivo was examined. Female BALB/c mice (age 7-9 weeks) were dosed intranasally with about 50 μM dsRNA (formulated in C12-norArg(NH₃+Cl—)—C12/DSPE-PEG2000/DSPC/cholesterol at a ratio of 30:1:20:49) or with 605 nmol/kg/day naked dsRNA for three consecutive days. About four hours after the final dose is administered, the mice were sacrificed to collect bronchoalveolar fluid (BALF), and collected blood is processed to serum for evaluation of the cytokine response. Bronchial lavage was performed with 0.5 mL ice-cold 0.3% BSA in saline two times for a total of 1 mL. BALF was spun and supernatants collected and frozen until cytokine analysis. Blood was collected from the vena cava immediately following euthanasia, placed into serum separator tubes, and allowed to clot at room temperature for at least 20 minutes. The samples were processed to serum, aliquoted into Millipore ULTRAFREE 0.22 μm filter tubes, spun at 12,000 rpm, frozen on dry ice, and then stored at −70° C. until analysis. Cytokine analysis of BALF and plasma were performed using the Procarta™ mouse 10-Plex Cytokine Assay Kit (Panomics, Fremont, Calif.) on a Bio-Plex™ array reader. Toxicity parameters were also measured, including body weights, prior to the first dose on day 0 and again on day 3 (just prior to euthanasia). Spleens were harvested and weighed (normalized to final body weight). The results are provided in Table 5.

TABLE 5
In vivo Cytokine Induction by Naked mdRNA

| | | | G1498:Nkd | | G1498:DSNkd | G1498:DSNkd | G1498:DSNkd |
|---|---|---|---|---|---|---|---|
| Cytokine | | G1498 | 11-1 | G1498:DS | 12-1 | 13-1 | 14-1 |
| IL-6 | Conc | 90.68 | 10.07 | 77.35 | 17.17 | 18.21 | 38.59 |
| | (pg/mL) | | | | | | |
| | Fold decrease | — | 9 | — | 5 | 4 | 2 |
| IL-12 | Conc | 661.48 | 20.32 | 1403.61 | 25.07 | 37.70 | 57.02 |
| (p40) | (pg/mL) | | | | | | |
| | Fold decrease | — | 33 | — | 56 | 37 | 25 |
| TNFα | Conc | 264.49 | 25.59 | 112.95 | 20.52 | 29.00 | 64.93 |
| | (pg/mL) | | | | | | |
| | Fold decrease | — | 10 | — | 6 | 4 | 2 |

[0217] The mdRNA (RISC or dicer sized) induced cytokines to lesser extent than the intact (i.e., not nicked) parent molecules. The decrease in cytokine induction was greatest when looking at IL-12(p40), the cytokine with consistently the highest levels of induction of the 10 cytokine multiplex assay. For the mdRNA, the decrease in IL-12 (p40) ranges from 25- to 56-fold, while the reduction in either IL-6 or TNFα induction was more modest (the decrease in these two cytokines ranges from 2- to 10-fold). Thus, the mdRNA structure appears to provide an advantage in vivo in that cytokine induction is minimized compared to unmodified dsRNA.

[0218] Similar results were obtained with the formulated mdRNA, although the reduction in induction was not as prominent. In addition, the presence or absence of a locked nucleic acid has no effect on cytokine induction. These results are shown in Table 6.

TABLE 6
In vivo Cytokine Induction by Formulated mdRNA

| | | | G1498:Nkd | G1498:Nkd | G1498:DSNkd | G1498:DSNkd |
|---|---|---|---|---|---|---|
| Cytokine | | G1498:DS | 12-1 | 13-1 | 14-1 | 13 |
| IL-6 | Conc (pg/mL) | 29.04 | 52.95 | 10.28 | 7.79 | 44.29 |
| | Fold decrease | — | −1.8 | 3 | 4 | −1.5 |
| IL-12 (p40) | Conc (pg/mL) | 298.93 | 604.24 | 136.45 | 126.71 | 551.49 |
| | Fold decrease | — | 0 | 2 | 2 | 1 |
| TNFα | Conc (pg/mL) | 13.49 | 21.35 | 3.15 | 3.15 | 18.69 |
| | Fold decrease | — | −1.6 | 4 | 4 | 1.4 |

[0219] The teachings of all of references cited herein including patents, patent applications, journal articles, wedpages, tables, and priority documents are incorporated herein in their entirety by reference. Although the foregoing disclosure has been described in detail by way of example for purposes of clarity of understanding, it will be apparent to the artisan that certain changes and modifications may be practiced within the scope of the appended claims which are presented by way of illustration not limitation. In this context, various publications and other references have been cited within the foregoing disclosure for economy of description. It is noted, however, that the various publications discussed herein are incorporated solely for their disclosure prior to the filing date of the present application, and the inventors reserve the right to antedate such disclosure by virtue of prior invention.

What is claimed is:

1. A meroduplex ribonucleic acid (mdRNA) molecule, comprising a first strand of 15 to 40 nucleotides in length that is complementary to a v-Erb erythroblastic leukemia viral oncogene (ERBB) mRNA as set forth in any one of SEQ ID NOS:1158-1161, 1803, 1804, 2543, 2544, and 3121, and a second strand and a third strand that are each complementary to non-overlapping regions of the first strand, wherein the second strand and third strands can anneal with the first strand to form at least two double-stranded regions spaced apart by up to 10 nucleotides and thereby forming a gap between the second and third strands, and wherein at least one double-stranded region comprises between about 5 base pairs and 13 base pairs.

2. The mdRNA molecule of claim 1 wherein the first strand is 15 to 25 nucleotides in length or 26 to 40 nucleotides in length.

3. The mdRNA molecule of claim 1 wherein the gap is a nick or the gap comprises at least one unpaired nucleotide in the first strand positioned between the double-stranded regions formed by the second and third strands when annealed to the first strand.

4. The mdRNA molecule of claim 1 wherein at least one uridine of the mdRNA molecule is a 5-methyluridine, 2-thioribothymidine, or 2′-O-methyl-5-methyluridine.

5. The mdRNA molecule of claim 1 wherein the mdRNA molecule comprises at least one locked nucleic acid (LNA) molecules, deoxy nucleotide, G clamp, 2′-sugar modification, modified internucleoside linkage, or any combination thereof.

6. The mdRNA molecule of claim 1 wherein the mdRNA contains at least one 3′-overhang comprising one to four nucleotides that is not part of the gap or wherein the mdRNA has a blunt end at one or both ends of the mdRNA.

7. The mdRNA molecule of claim 1, wherein the third strand comprises a 5′-terminal end comprising a hydroxyl or a phosphate.

8. An mdRNA molecule, comprising a first strand that is complementary to a human ERBB mRNA as set forth in any one of SEQ ID NOS:1158-1161, 1803, 1804, 2543, 2544, and 3121, and a second strand and a third strand that is each complementary to non-overlapping regions of the first strand, wherein the second strand and third strands can anneal with the first strand to form at least two double-stranded regions spaced apart by up to 10 nucleotides and thereby forming a gap between the second and third strands, and wherein at least one pyrimidine of the mdRNA comprises a pyrimidine nucleoside according to Formula I or II: [chemical structure]
wherein:
R¹ and R² are each independently a —H, —OH, —OCH₃, —OCH₂OCH₂CH₃, —OCH₂CH₂OCH₃, halogen, substituted or unsubstituted C₁-C₁₀ alkyl, alkoxy, alkoxyalkyl, hydroxyalkyl, carboxyalkyl, alkylsulfonylamino, aminoalkyl, dialkylamino, alkylaminoalkyl, dialkylaminoalkyl, haloalkyl, trifluoromethyl, cycloalkyl, (cycloalkyl)alkyl, substituted or unsubstituted C₂-C₁₀ alkenyl, substituted or unsubstituted —O-allyl, —O—CH₂CH═CH₂, —O—CH═CHCH₃, substituted or unsubstituted C₂-C₁₀ alkynyl, carbamoyl, carbamyl, carboxy, carbonylamino, substituted or unsubstituted aryl, substituted or unsubstituted aralkyl, —NH₂, —NO₂, —C≡N, or heterocyclo group,
R³ and R⁴ are each independently a hydroxyl, a protected hydroxyl, a phosphate, or an internucleoside linking group, and
R⁵ and R⁸ are each independently O or S.

9. The mdRNA molecule of claim 8 wherein the first strand is 15 to 25 nucleotides in length or 26 to 40 nucleotides in length.

10. The mdRNA molecule of claim 8 wherein the gap is a nick or the gap comprises at least one unpaired nucleotide in the first strand positioned between the double-stranded regions formed by the second and third strands when annealed to the first strand.

11. The mdRNA molecule of claim 8 wherein at least one nucleoside is according to Formula I and in which R¹ is methyl and R² is —OH or —O-methyl.

12. The mdRNA molecule of claim 8 wherein at least one R² is selected from the group consisting of 2′-O—(C₁-C₅)alkyl, 2′-O-methyl, 2′-OCH₂OCH₂CH₃, 2′-OCH₂CH₂OCH₃, 2′-O-allyl, and 2′-fluoro.

13. The mdRNA molecule of claim 8 wherein at least one uridine of the mdRNA molecule is a 5-methyluridine, 2-thioribothymidine, or 2′-O-methyl-5-methyluridine.

14. The mdRNA molecule of claim 8 wherein the mdRNA molecule comprises at least one locked nucleic acid (LNA) molecule, deoxy nucleotide, G clamp, 2′-sugar modification, modified internucleoside linkage, or any combination thereof.

15. The mdRNA molecule of claim 8, wherein the mdRNA contains at least one 3′-overhang comprising one to four nucleotides that is not a part of the gap or wherein the mdRNA molecule has a blunt end on one or both ends of the mdRNA molecule.

16. An mdRNA molecule, comprising a first strand that is complementary to a human ERBB mRNA as set forth in any one of SEQ ID NOS:1158-1161, 1803, 1804, 2543, 2544, and 3121, and a second strand and a third strand that are each complementary to non-overlapping regions of the first strand, wherein the second strand and third strands can anneal with the first strand to form at least two double-stranded regions spaced apart by up to 10 nucleotides and thereby forming a gap between the second and third strands, and wherein the combined double-stranded regions total about 15 base pairs to about 40 base pairs.

17. The mdRNA molecule of claim 16 wherein the first strand is 15 to 25 nucleotides in length or 26 to 40 nucleotides in length.

18. The mdRNA molecule of claim 16 wherein the gap is a nick or the gap comprises at least one unpaired nucleotide in the first strand positioned between the double-stranded regions formed by the second and third strands when annealed to the first strand.

19. The mdRNA molecule of claim 16 wherein at least one uridine of the mdRNA molecule is a 5-methyluridine, 2-thioribothymidine, or 2′-O-methyl-5-methyluridine.

20. The mdRNA molecule of claim 1 wherein the first strand is 19 to 23 nucleotides in length and is complementary to a human EGFR nucleic acid sequence as set forth in any one of SEQ ID NOS:1162-1527, or human ERBB2 nucleic acid sequence as set forth in any one of SEQ ID NOS:1805-2328, or human ERBB3 nucleic acid sequence as set forth in any one of SEQ ID NOS:2545-2873, or human ERBB3 nucleic acid sequence as set forth in any one of SEQ ID NOS:3122-3780.

21. The mdRNA molecule of claim 1 wherein the first strand is 25 to 29 nucleotides in length and is complementary to a human EGFR nucleic acid sequence as set forth in any one of SEQ ID NOS:1528-1802, or human ERBB2 nucleic acid sequence as set forth in any one of SEQ ID NOS:2329-2542, or human ERBB3 nucleic acid sequence as set forth in any one of SEQ ID NOS:2874-3120, or human ERBB3 nucleic acid sequence as set forth in any one of SEQ ID NOS:3781-4273.

22. A method for reducing the expression of a human ERBB gene, comprising administering an mdRNA molecule according to claim 1 to a cell expressing an ERBB gene, wherein the mdRNA molecule reduces expression of the ERBB gene in the cell.

23. The method according to claim 22 wherein the cell is human.

The application's sequence listing, which the Patent Office published only in electronic form, follows.

SEQUENCE LISTING (4249 sequences)

SEQ ID NO: 1 - DNA, 21 bp, Artificial Sequence
  Description of Combined DNA/RNA Molecule: Synthetic oligonucleotide
  Description of Artificial Sequence: Synthetic oligonucleotide
cuacacaaaucagcgauuutt

SEQ ID NO: 2 - DNA, 21 bp, Artificial Sequence
  Description of Combined DNA/RNA Molecule: Synthetic oligonucleotide
  Description of Artificial Sequence: Synthetic oligonucleotide
aaaucgcugauuuguguagtt

SEQ ID NO: 3 - DNA, 25 bp, Artificial Sequence
  Description of Combined DNA/RNA Molecule: Synthetic oligonucleotide
  Description of Artificial Sequence: Synthetic oligonucleotide
cuacacaaaucagcgauuuccaugt

SEQ ID NO: 4 - RNA, 27 nt, Artificial Sequence
  Description of Artificial Sequence: Synthetic oligonucleotide
acauggaaaucgcugauuuguguaguc

SEQ ID NO: 5 - RNA, 13 nt, Artificial Sequence
  Description of Artificial Sequence: Synthetic oligonucleotide
cuacacaaaucag

SEQ ID NO: 6 - DNA, 11 bp, Artificial Sequence
  Description of Combined DNA/RNA Molecule: Synthetic oligonucleotide
  Description of Artificial Sequence: Synthetic oligonucleotide
gauuuccaugt

SEQ ID NO: 7 - DNA, 21 bp, Artificial Sequence
  Description of Combined DNA/RNA Molecule: Synthetic oligonucleotide
  Description of Artificial Sequence: Synthetic oligonucleotide
ggaucuuauuucuucggagtt

SEQ ID NO: 8 - DNA, 21 bp, Artificial Sequence
  Description of Combined DNA/RNA Molecule: Synthetic oligonucleotide
  Description of Artificial Sequence: Synthetic oligonucleotide
cuccgaagaaauaagaucctt

SEQ ID NO: 9 - RNA, 11 nt, Artificial Sequence
  Description of Artificial Sequence: Synthetic oligonucleotide
ggaucuuauuu

SEQ ID NO: 10 - DNA, 10 bp, Artificial Sequence
  Description of Combined DNA/RNA Molecule: Synthetic oligonucleotide
  Description of Artificial Sequence: Synthetic oligonucleotide
cuucggagtt

SEQ ID NO: 11 - RNA, 27 nt, Artificial Sequence
  Description of Artificial Sequence: Synthetic oligonucleotide
cauugucuccgaagaaauaagauccuu

SEQ ID NO: 12 - RNA, 8 nt, Artificial Sequence
  Description of Artificial Sequence: Synthetic oligonucleotide
  modified_base (2): LNA-G
ggaucuua

SEQ ID NO: 13 - DNA, 17 bp, Artificial Sequence
  Description of Combined DNA/RNA Molecule: Synthetic oligonucleotide
  Description of Artificial Sequence: Synthetic oligonucleotide
uuucuucggagacaatg

SEQ ID NO: 14 - DNA, 16 bp, Artificial Sequence
  Description of Combined DNA/RNA Molecule: Synthetic oligonucleotide
  Description of Artificial Sequence: Synthetic oligonucleotide
uucuucggagacaatg

SEQ ID NO: 15 - DNA, 15 bp, Artificial Sequence
  Description of Combined DNA/RNA Molecule: Synthetic oligonucleotide
  Description of Artificial Sequence: Synthetic oligonucleotide
ucuucggagacaatg

SEQ ID NO: 16 - DNA, 14 bp, Artificial Sequence
  Description of Combined DNA/RNA Molecule: Synthetic oligonucleotide
  Description of Artificial Sequence: Synthetic oligonucleotide
cuucggagacaatg

SEQ ID NO: 17 - DNA, 13 bp, Artificial Sequence
  Description of Combined DNA/RNA Molecule: Synthetic oligonucleotide
  Description of Artificial Sequence: Synthetic oligonucleotide
uucggagacaatg

SEQ ID NO: 18 - DNA, 12 bp, Artificial Sequence
  Description of Combined DNA/RNA Molecule: Synthetic oligonucleotide
  Description of Artificial Sequence: Synthetic oligonucleotide
ucggagacaatg

SEQ ID NO: 19 - DNA, 11 bp, Artificial Sequence
  Description of Combined DNA/RNA Molecule: Synthetic oligonucleotide
  Description of Artificial Sequence: Synthetic oligonucleotide
cggagacaatg

SEQ ID NO: 20 - RNA, 9 nt, Artificial Sequence
  Description of Artificial Sequence: Synthetic oligonucleotide
  modified_base (2): LNA-G
ggaucuuau

SEQ ID NO: 21 - RNA, 10 nt, Artificial Sequence
  Description of Artificial Sequence: Synthetic oligonucleotide
  modified_base (2): LNA-G
ggaucuuauu

SEQ ID NO: 22 - RNA, 11 nt, Artificial Sequence
  Description of Artificial Sequence: Synthetic oligonucleotide
  modified_base (2): LNA-G
ggaucuuauuu

SEQ ID NO: 23 - RNA, 12 nt, Artificial Sequence
  Description of Artificial Sequence: Synthetic oligonucleotide
  modified_base (2): LNA-G
ggaucuuauuuc

SEQ ID NO: 24 - RNA, 8 nt, Artificial Sequence
  Description of Artificial Sequence: Synthetic oligonucleotide
  modified_base (3): LNA-A
cuacacaa

SEQ ID NO: 25 - DNA, 13 bp, Artificial Sequence
  Description of Artificial Sequence: Synthetic oligonucleotide
  modified_base (8): LNA-A
aucagcgauuutt

SEQ ID NO: 26 - DNA, 12 bp, Artificial Sequence
  Description of Artificial Sequence: Synthetic oligonucleotide
  modified_base (7): LNA-A
ucagcgauuutt

SEQ ID NO: 27 - DNA, 11 bp, Artificial Sequence
  Description of Artificial Sequence: Synthetic oligonucleotide
  modified_base (6): LNA-A
cagcgauuutt

SEQ ID NO: 28 - DNA, 10 bp, Artificial Sequence
  Description of Artificial Sequence: Synthetic oligonucleotide
  modified_base (5): LNA-A
agcgauuutt

SEQ ID NO: 29 - DNA, 9 bp, Artificial Sequence
  Description of Artificial Sequence: Synthetic oligonucleotide
  modified_base (4): LNA-A
gcgauuutt

SEQ ID NO: 30 - DNA, 8 bp, Artificial Sequence
  Description of Artificial Sequence: Synthetic oligonucleotide
  modified_base (3): LNA-A
cgauuutt

SEQ ID NO: 31 - DNA, 7 bp, Artificial Sequence
  Description of Artificial Sequence: Synthetic oligonucleotide
  modified_base (2): LNA-A
gauuutt

SEQ ID NO: 32 - RNA, 9 nt, Artificial Sequence
  Description of Artificial Sequence: Synthetic oligonucleotide
  modified_base (3): LNA-A
cuacacaaa

SEQ ID NO: 33 - RNA, 10 nt, Artificial Sequence
  Description of Artificial Sequence: Synthetic oligonucleotide
  modified_base (3): LNA-A
cuacacaaau

SEQ ID NO: 34 - RNA, 11 nt, Artificial Sequence
  Description of Artificial Sequence: Synthetic oligonucleotide
  modified_base (3): LNA-A
cuacacaaauc

SEQ ID NO: 35 - RNA, 12 nt, Artificial Sequence
  Description of Artificial Sequence: Synthetic oligonucleotide
  modified_base (3): LNA-A
cuacacaaauca

SEQ ID NO: 36 - RNA, 13 nt, Artificial Sequence
  Description of Artificial Sequence: Synthetic oligonucleotide
  modified_base (3): LNA-A
cuacacaaaucag

SEQ ID NO: 37 - RNA, 14 nt, Artificial Sequence
  Description of Artificial Sequence: Synthetic oligonucleotide
  modified_base (3): LNA-A
cuacacaaaucagc

SEQ ID NO: 38 - RNA, 13 nt, Artificial Sequence
  Description of Artificial Sequence: Synthetic oligonucleotide
  modified_base (2): LNA-G
ggaucuuauuucu

SEQ ID NO: 39 - RNA, 14 nt, Artificial Sequence
  Description of Artificial Sequence: Synthetic oligonucleotide
  modified_base (2): LNA-G
ggaucuuauuucuu

SEQ ID NO: 40 - RNA, 8 nt, Artificial Sequence
  Description of Artificial Sequence: Synthetic oligonucleotide
  modified_base (2): LNA-G
  modified_base (8): LNA-A
ggaucuua

SEQ ID NO: 41 - RNA, 9 nt, Artificial Sequence
  Description of Artificial Sequence: Synthetic oligonucleotide
  modified_base (2): LNA-G
  modified_base (9): LNA-U
ggaucuuau

SEQ ID NO: 42 - RNA, 10 nt, Artificial Sequence
  Description of Artificial Sequence: Synthetic oligonucleotide
  modified_base (2): LNA-G
  modified_base (10): LNA-U
ggaucuuauu

SEQ ID NO: 43 - RNA, 11 nt, Artificial Sequence
  Description of Artificial Sequence: Synthetic oligonucleotide
  modified_base (2): LNA-G
  modified_base (11): LNA-U
ggaucuuauuu

SEQ ID NO: 44 - RNA, 12 nt, Artificial Sequence
  Description of Artificial Sequence: Synthetic oligonucleotide
  modified_base (2): LNA-G
  modified_base (12): LNA-C
ggaucuuauuuc

SEQ ID NO: 45 - RNA, 13 nt, Artificial Sequence
  Description of Artificial Sequence: Synthetic oligonucleotide
  modified_base (2): LNA-G
  modified_base (13): LNA-U
ggaucuuauuucu

SEQ ID NO: 46 - RNA, 14 nt, Artificial Sequence
  Description of Artificial Sequence: Synthetic oligonucleotide
  modified_base (2): LNA-G
  modified_base (14): LNA-U
ggaucuuauuucuu

SEQ ID NO: 47 - DNA, 13 bp, Artificial Sequence
  Description of Combined DNA/RNA Molecule: Synthetic oligonucleotide
  Description of Artificial Sequence: Synthetic oligonucleotide
  modified_base (8): LNA-G
uuucuucggagtt

SEQ ID NO: 48 - DNA, 12 bp, Artificial Sequence
  Description of Combined DNA/RNA Molecule: Synthetic oligonucleotide
  Description of Artificial Sequence: Synthetic oligonucleotide
  modified_base (7): LNA-G
uucuucggagtt

SEQ ID NO: 49 - DNA, 11 bp, Artificial Sequence
  Description of Combined DNA/RNA Molecule: Synthetic oligonucleotide
  Description of Artificial Sequence: Synthetic oligonucleotide
  modified_base (6): LNA-G
ucuucggagtt

SEQ ID NO: 50 - DNA, 10 bp, Artificial Sequence
  Description of Combined DNA/RNA Molecule: Synthetic oligonucleotide
  Description of Artificial Sequence: Synthetic oligonucleotide
  modified_base (5): LNA-G
cuucggagtt

SEQ ID NO: 51 - DNA, 9 bp, Artificial Sequence
  Description of Combined DNA/RNA Molecule: Synthetic oligonucleotide
  Description of Artificial Sequence: Synthetic oligonucleotide
  modified_base (4): LNA-G
uucggagtt

SEQ ID NO: 52 - DNA, 8 bp, Artificial Sequence
  Description of Combined DNA/RNA Molecule: Synthetic oligonucleotide
  Description of Artificial Sequence: Synthetic oligonucleotide
  modified_base (3): LNA-G
ucggagtt

SEQ ID NO: 53 - DNA, 7 bp, Artificial Sequence
  Description of Combined DNA/RNA Molecule: Synthetic oligonucleotide
  Description of Artificial Sequence: Synthetic oligonucleotide
  modified_base (2): LNA-G
cggagtt

SEQ ID NO: 54 - DNA, 13 bp, Artificial Sequence
  Description of Combined DNA/RNA Molecule: Synthetic oligonucleotide
  Description of Artificial Sequence: Synthetic oligonucleotide
  modified_base (1): LNA-U
  modified_base (8): LNA-G
uuucuucggagtt

SEQ ID NO: 55 - DNA, 12 bp, Artificial Sequence
  Description of Combined DNA/RNA Molecule: Synthetic oligonucleotide
  Description of Artificial Sequence: Synthetic oligonucleotide
  modified_base (1): LNA-U
  modified_base (7): LNA-G
uucuucggagtt

SEQ ID NO: 56 - DNA, 11 bp, Artificial Sequence
  Description of Combined DNA/RNA Molecule: Synthetic oligonucleotide
  Description of Artificial Sequence: Synthetic oligonucleotide
  modified_base (1): LNA-U
  modified_base (6): LNA-G
ucuucggagtt

SEQ ID NO: 57 - DNA, 10 bp, Artificial Sequence
  Description of Combined DNA/RNA Molecule: Synthetic oligonucleotide
  Description of Artificial Sequence: Synthetic oligonucleotide
  modified_base (1): LNA-C
  modified_base (5): LNA-G
cuucggagtt

SEQ ID NO: 58 - DNA, 9 bp, Artificial Sequence
  Description of Combined DNA/RNA Molecule: Synthetic oligonucleotide
  Description of Artificial Sequence: Synthetic oligonucleotide
  modified_base (1): LNA-U
  modified_base (4): LNA-G
uucggagtt

SEQ ID NO: 59 - DNA, 8 bp, Artificial Sequence
  Description of Combined DNA/RNA Molecule: Synthetic oligonucleotide
  Description of Artificial Sequence: Synthetic oligonucleotide
  modified_base (1): LNA-U
  modified_base (3): LNA-G
ucggagtt

SEQ ID NO: 60 - DNA, 7 bp, Artificial Sequence
  Description of Combined DNA/RNA Molecule: Synthetic oligonucleotide
  Description of Artificial Sequence: Synthetic oligonucleotide
  modified_base (1): LNA-C
  modified_base (2): LNA-G
cggagtt

SEQ ID NO: 61 - DNA, 21 bp, Artificial Sequence
  Description of Combined DNA/RNA Molecule: Synthetic oligonucleotide
  Description of Artificial Sequence: Synthetic oligonucleotide
  modified_base (2): LNA-G
  modified_base (16): LNA-G
ggaucuuauuucuucggagtt

SEQ ID NO: 62 - DNA, 25 bp, Artificial Sequence
  Description of Combined DNA/RNA Molecule: Synthetic oligonucleotide
  Description of Artificial Sequence: Synthetic oligonucleotide
ggaucuuauuucuucggagacaatg

SEQ ID NO: 63 - RNA, 25 nt, Artificial Sequence
  Description of Artificial Sequence: Synthetic oligonucleotide
uuaagcagaguucaaaagcccuuca

SEQ ID NO: 64 - RNA, 25 nt, Artificial Sequence
  Description of Artificial Sequence: Synthetic oligonucleotide
uaagcagaguucaaaagcccuucag

SEQ ID NO: 65 - RNA, 25 nt, Artificial Sequence
  Description of Artificial Sequence: Synthetic oligonucleotide
agcagaguucaaaagcccuucagcg

SEQ ID NO: 66 - RNA, 25 nt, Artificial Sequence
  Description of Artificial Sequence: Synthetic oligonucleotide
cucagggucugagugaagccgcucg

SEQ ID NO: 67 - RNA, 25 nt, Artificial Sequence
  Description of Artificial Sequence: Synthetic oligonucleotide
caagcaacuacaucacgccagucaa

SEQ ID NO: 68 - RNA, 25 nt, Artificial Sequence
  Description of Artificial Sequence: Synthetic oligonucleotide
aucaauggcagcuucuuggugcgug

SEQ ID NO: 69 - RNA, 25 nt, Artificial Sequence
  Description of Artificial Sequence: Synthetic oligonucleotide
uuccagcccacauuggauucaucag

SEQ ID NO: 70 - RNA, 25 nt, Artificial Sequence
  Description of Artificial Sequence: Synthetic oligonucleotide
cagcugagaauguggaauaccuaag

SEQ ID NO: 71 - RNA, 25 nt, Artificial Sequence
  Description of Artificial Sequence: Synthetic oligonucleotide
aacguaucuccuaauuugaggcuca

SEQ ID NO: 72 - RNA, 25 nt, Artificial Sequence
  Description of Artificial Sequence: Synthetic oligonucleotide
ccuaaaauaauuucucuacaauugg

SEQ ID NO: 73 - RNA, 25 nt, Artificial Sequence
  Description of Artificial Sequence: Synthetic oligonucleotide
uggaagauucagcuaguuaggagcc

SEQ ID NO: 74 - RNA, 25 nt, Artificial Sequence
  Description of Artificial Sequence: Synthetic oligonucleotide
uuaaacucuccuagucaauauccac

SEQ ID NO: 75 - RNA, 25 nt, Artificial Sequence
  Description of Artificial Sequence: Synthetic oligonucleotide
cagccuacaguuauguucagucaca

SEQ ID NO: 76 - RNA, 25 nt, Artificial Sequence
  Description of Artificial Sequence: Synthetic oligonucleotide
guuauguucagucacacacacauac

SEQ ID NO: 77 - RNA, 25 nt, Artificial Sequence
  Description of Artificial Sequence: Synthetic oligonucleotide
cacauacaaaauguuccuuuugcuu

SEQ ID NO: 78 - RNA, 25 nt, Artificial Sequence
  Description of Artificial Sequence: Synthetic oligonucleotide
uccuuuugcuuuuaaaguaauuuuu

SEQ ID NO: 79 - RNA, 25 nt, Artificial Sequence
  Description of Artificial Sequence: Synthetic oligonucleotide
ugaccugugaagcaacagucaaugg

SEQ ID NO: 80 - RNA, 25 nt, Artificial Sequence
  Description of Artificial Sequence: Synthetic oligonucleotide
cuaucucacacaucgacaaaccaau

SEQ ID NO: 81 - RNA, 25 nt, Artificial Sequence
  Description of Artificial Sequence: Synthetic oligonucleotide
uguccucaauuguacugcuaccacu

SEQ ID NO: 82 - RNA, 25 nt, Artificial Sequence
  Description of Artificial Sequence: Synthetic oligonucleotide
aaaccguagcuggcaagcggucuua

SEQ ID NO: 83 - RNA, 25 nt, Artificial Sequence
  Description of Artificial Sequence: Synthetic oligonucleotide
uagcuggcaagcggucuuaccggcu

SEQ ID NO: 84 - RNA, 25 nt, Artificial Sequence
  Description of Artificial Sequence: Synthetic oligonucleotide
uuguaugguuaaaagauggguuacc

SEQ ID NO: 85 - RNA, 25 nt, Artificial Sequence
  Description of Artificial Sequence: Synthetic oligonucleotide
ugguuaaaagauggguuaccugcga

SEQ ID NO: 86 - RNA, 25 nt, Artificial Sequence
  Description of Artificial Sequence: Synthetic oligonucleotide
cagggaauuauacaaucuugcugag

SEQ ID NO: 87 - RNA, 25 nt, Artificial Sequence
  Description of Artificial Sequence: Synthetic oligonucleotide
acaaucuugcugagcauaaaacagu

SEQ ID NO: 88 - RNA, 25 nt, Artificial Sequence
  Description of Artificial Sequence: Synthetic oligonucleotide
ccaauaaugaagaguccuuuauccu

SEQ ID NO: 89 - RNA, 25 nt, Artificial Sequence
  Description of Artificial Sequence: Synthetic oligonucleotide
acuuuggauguuccaacgcaaguug

SEQ ID NO: 90 - RNA, 25 nt, Artificial Sequence
  Description of Artificial Sequence: Synthetic oligonucleotide
aaugcuuccacuaaacugaaaccau

SEQ ID NO: 91 - RNA, 25 nt, Artificial Sequence
  Description of Artificial Sequence: Synthetic oligonucleotide
gagaaaguuugacuuuguuaaauau

SEQ ID NO: 92 - RNA, 25 nt, Artificial Sequence
  Description of Artificial Sequence: Synthetic oligonucleotide
aaagaacuacuguauauuaaaaguu

SEQ ID NO: 93 - RNA, 25 nt, Artificial Sequence
  Description of Artificial Sequence: Synthetic oligonucleotide
uuagaaauacggguuuugacuuaac

SEQ ID NO: 94 - RNA, 25 nt, Artificial Sequence
  Description of Artificial Sequence: Synthetic oligonucleotide
aacauggguacagcaaacucagcac

SEQ ID NO: 95 - RNA, 25 nt, Artificial Sequence
  Description of Artificial Sequence: Synthetic oligonucleotide
aaagacacagaagaugcugaccuca

SEQ ID NO: 96 - RNA, 25 nt, Artificial Sequence
  Description of Artificial Sequence: Synthetic oligonucleotide
uaguagggagguuuauucagaucgc

SEQ ID NO: 97 - RNA, 25 nt, Artificial Sequence
  Description of Artificial Sequence: Synthetic oligonucleotide
gccuucugcagcaggguucugggau

SEQ ID NO: 98 - RNA, 25 nt, Artificial Sequence
  Description of Artificial Sequence: Synthetic oligonucleotide
ggucugguacauauuggaaauuaug

SEQ ID NO: 99 - RNA, 25 nt, Artificial Sequence
  Description of Artificial Sequence: Synthetic oligonucleotide
cuaguccuuccgauggaagcacuag

SEQ ID NO: 100 - RNA, 25 nt, Artificial Sequence
  Description of Artificial Sequence: Synthetic oligonucleotide
ccagugaauauuguuuuuaugugga

SEQ ID NO: 101 - RNA, 25 nt, Artificial Sequence
  Description of Artificial Sequence: Synthetic oligonucleotide
augaauucaaguuggaauugguaga

SEQ ID NO: 102 - RNA, 25 nt, Artificial Sequence
  Description of Artificial Sequence: Synthetic oligonucleotide
caggacacagauuuagacuuggaga

SEQ ID NO: 103 - RNA, 25 nt, Artificial Sequence
  Description of Artificial Sequence: Synthetic oligonucleotide
cucaaagcacaguuacaguauucca

SEQ ID NO: 104 - RNA, 25 nt, Artificial Sequence
  Description of Artificial Sequence: Synthetic oligonucleotide
accacugccaccacugaugaauuaa

SEQ ID NO: 105 - RNA, 25 nt, Artificial Sequence
  Description of Artificial Sequence: Synthetic oligonucleotide
gaaacuacuagugccacaucaucac

SEQ ID NO: 106 - RNA, 25 nt, Artificial Sequence
  Description of Artificial Sequence: Synthetic oligonucleotide
aagucggacagccucaccaaacaga

SEQ ID NO: 107 - RNA, 25 nt, Artificial Sequence
  Description of Artificial Sequence: Synthetic oligonucleotide
gaaagcgaaaaauggaacaugaugg

SEQ ID NO: 108 - RNA, 25 nt, Artificial Sequence
  Description of Artificial Sequence: Synthetic oligonucleotide
cccucugauuuagcauguagacugc

SEQ ID NO: 109 - RNA, 25 nt, Artificial Sequence
  Description of Artificial Sequence: Synthetic oligonucleotide
ugagcuauuuaaggaucuauuuaug

SEQ ID NO: 110 - RNA, 25 nt, Artificial Sequence
  Description of Artificial Sequence: Synthetic oligonucleotide
aaaaggugaaaaagcacuauuauca

SEQ ID NO: 111 - RNA, 25 nt, Artificial Sequence
  Description of Artificial Sequence: Synthetic oligonucleotide
gaaaaagcacuauuaucaguucugc

SEQ ID NO: 112 - RNA, 25 nt, Artificial Sequence
  Description of Artificial Sequence: Synthetic oligonucleotide
ggcugaaaagaaagauuaaaccuac

SEQ ID NO: 113 - RNA, 25 nt, Artificial Sequence
  Description of Artificial Sequence: Synthetic oligonucleotide
uaaacccuuauaauaaaauccuucu

SEQ ID NO: 114 - RNA, 25 nt, Artificial Sequence
  Description of Artificial Sequence: Synthetic oligonucleotide
cauacuauuagccaaugcuguagac

SEQ ID NO: 115 - RNA, 25 nt, Artificial Sequence
  Description of Artificial Sequence: Synthetic oligonucleotide
gacagaagcauuuugauaggaauag

SEQ ID NO: 116 - RNA, 25 nt, Artificial Sequence
  Description of Artificial Sequence: Synthetic oligonucleotide
agagcaaauaagauaauggcccuga

SEQ ID NO: 117 - RNA, 25 nt, Artificial Sequence
  Description of Artificial Sequence: Synthetic oligonucleotide
ccaacauuuuucucuuccucaagca

SEQ ID NO: 118 - RNA, 25 nt, Artificial Sequence
  Description of Artificial Sequence: Synthetic oligonucleotide
uuaaguaugagaaaaguucagccca

SEQ ID NO: 119 - RNA, 25 nt, Artificial Sequence
  Description of Artificial Sequence: Synthetic oligonucleotide
caggaauaaagauggcugcugaacc

SEQ ID NO: 120 - RNA, 25 nt, Artificial Sequence
  Description of Artificial Sequence: Synthetic oligonucleotide
aauuugaaugaccaaguucucuuca

SEQ ID NO: 121 - RNA, 25 nt, Artificial Sequence
  Description of Artificial Sequence: Synthetic oligonucleotide
auguauaaagauagccagccuagag

SEQ ID NO: 122 - RNA, 25 nt, Artificial Sequence
  Description of Artificial Sequence: Synthetic oligonucleotide
ggcuguaacuaucucugugaagugu

SEQ ID NO: 123 - RNA, 25 nt, Artificial Sequence
  Description of Artificial Sequence: Synthetic oligonucleotide
ucugugaagugugagaaaauuucaa

SEQ ID NO: 124 - RNA, 25 nt, Artificial Sequence
  Description of Artificial Sequence: Synthetic oligonucleotide
ccuuuaaggaaaugaauccuccuga

SEQ ID NO: 125 - RNA, 25 nt, Artificial Sequence
  Description of Artificial Sequence: Synthetic oligonucleotide
aaggauacaaaaagugacaucauau

SEQ ID NO: 126 - RNA, 25 nt, Artificial Sequence
  Description of Artificial Sequence: Synthetic oligonucleotide
agaugcaauuugaaucuucaucaua

SEQ ID NO: 127 - RNA, 25 nt, Artificial Sequence
  Description of Artificial Sequence: Synthetic oligonucleotide
guucaaaacgaagacuagcuauuaa

SEQ ID NO: 128 - RNA, 25 nt, Artificial Sequence
  Description of Artificial Sequence: Synthetic oligonucleotide
gugaaaccucaucucuacuaaaaau

SEQ ID NO: 129 - RNA, 25 nt, Artificial Sequence
  Description of Artificial Sequence: Synthetic oligonucleotide
acgaaagagaagcucuaucucgccu

SEQ ID NO: 130 - RNA, 25 nt, Artificial Sequence
  Description of Artificial Sequence: Synthetic oligonucleotide
cuccacaagcgccuucgguccaguu

SEQ ID NO: 131 - RNA, 25 nt, Artificial Sequence
  Description of Artificial Sequence: Synthetic oligonucleotide
gagaagauuccaaagauguagccgc

SEQ ID NO: 132 - RNA, 25 nt, Artificial Sequence
  Description of Artificial Sequence: Synthetic oligonucleotide
aaucuggauucaaugaggagacuug

SEQ ID NO: 133 - RNA, 25 nt, Artificial Sequence
  Description of Artificial Sequence: Synthetic oligonucleotide
agaacagauuugagaguagugagga

SEQ ID NO: 134 - RNA, 25 nt, Artificial Sequence
  Description of Artificial Sequence: Synthetic oligonucleotide
ccagagcugugcagaugaguacaaa

SEQ ID NO: 135 - RNA, 25 nt, Artificial Sequence
  Description of Artificial Sequence: Synthetic oligonucleotide
ccucagauuguuguuguuaaugggc

SEQ ID NO: 136 - RNA, 25 nt, Artificial Sequence
  Description of Artificial Sequence: Synthetic oligonucleotide
cuauuuuaauuauuuuuaauuuauu

SEQ ID NO: 137 - RNA, 25 nt, Artificial Sequence
  Description of Artificial Sequence: Synthetic oligonucleotide
uuuaauuuauuaauauuuaaauaug

SEQ ID NO: 138 - RNA, 25 nt, Artificial Sequence
  Description of Artificial Sequence: Synthetic oligonucleotide
augcaguuugaauauccuuuguuuc

SEQ ID NO: 139 - RNA, 25 nt, Artificial Sequence
  Description of Artificial Sequence: Synthetic oligonucleotide
caugcugcuggcgucuaaguguuug

SEQ ID NO: 140 - RNA, 25 nt, Artificial Sequence
  Description of Artificial Sequence: Synthetic oligonucleotide
agaugugcauuucaccugugacaaa

SEQ ID NO: 141 - RNA, 25 nt, Artificial Sequence
  Description of Artificial Sequence: Synthetic oligonucleotide
ucaaaaccugugccaggcugaauua

SEQ ID NO: 142 - RNA, 25 nt, Artificial Sequence
  Description of Artificial Sequence: Synthetic oligonucleotide
gaauguggguagucauucuuacaau

SEQ ID NO: 143 - RNA, 25 nt, Artificial Sequence
  Description of Artificial Sequence: Synthetic oligonucleotide
auguggguagucauucuuacaauug

SEQ ID NO: 144 - RNA, 25 nt, Artificial Sequence
  Description of Artificial Sequence: Synthetic oligonucleotide
ugaaaaugagcaucagagaguguac

SEQ ID NO: 145 - RNA, 25 nt, Artificial Sequence
  Description of Artificial Sequence: Synthetic oligonucleotide
uugcuuuucauguagaacucagcag

SEQ ID NO: 146 - RNA, 25 nt, Artificial Sequence
  Description of Artificial Sequence: Synthetic oligonucleotide
uguauuucuauauuuauuuucagua

SEQ ID NO: 147 - RNA, 25 nt, Artificial Sequence
  Description of Artificial Sequence: Synthetic oligonucleotide
uuugauuaauguuucuuaaauggaa

SEQ ID NO: 148 - RNA, 25 nt, Artificial Sequence
  Description of Artificial Sequence: Synthetic oligonucleotide
caacguguauagugccuaaaauugu

SEQ ID NO: 149 - RNA, 25 nt, Artificial Sequence
  Description of Artificial Sequence: Synthetic oligonucleotide
cauauccuuggcuacuaacaucugg

SEQ ID NO: 150 - RNA, 25 nt, Artificial Sequence
  Description of Artificial Sequence: Synthetic oligonucleotide
uacuaacaucuggagacugugagcu

SEQ ID NO: 151 - RNA, 25 nt, Artificial Sequence
  Description of Artificial Sequence: Synthetic oligonucleotide
cauaaguugugugcuuuuuauuaau

SEQ ID NO: 152 - RNA, 25 nt, Artificial Sequence
  Description of Artificial Sequence: Synthetic oligonucleotide
gcaucauuuuggcucuucuuacauu

SEQ ID NO: 153 - RNA, 25 nt, Artificial Sequence
  Description of Artificial Sequence: Synthetic oligonucleotide
gcucuucuuacauuuguaaaaaugu

SEQ ID NO: 154 - RNA, 25 nt, Artificial Sequence
  Description of Artificial Sequence: Synthetic oligonucleotide
agauuaggucaucuuaauucauauu

SEQ ID NO: 155 - RNA, 25 nt, Artificial Sequence
  Description of Artificial Sequence: Synthetic oligonucleotide
auggaauugaaagaacuaaucauga

SEQ ID NO: 156 - RNA, 25 nt, Artificial Sequence
  Description of Artificial Sequence: Synthetic oligonucleotide
cacacucauuccuucugcucuuggg

SEQ ID NO: 157 - RNA, 25 nt, Artificial Sequence
  Description of Artificial Sequence: Synthetic oligonucleotide
uguagagguaaccaguagcuuugag

SEQ ID NO: 158 - RNA, 25 nt, Artificial Sequence
  Description of Artificial Sequence: Synthetic oligonucleotide
caaccacaugccacguaauauuuca

SEQ ID NO: 159 - RNA, 25 nt, Artificial Sequence
  Description of Artificial Sequence: Synthetic oligonucleotide
ucggaaacaaguuauucucuucacu

SEQ ID NO: 160 - RNA, 25 nt, Artificial Sequence
  Description of Artificial Sequence: Synthetic oligonucleotide
acucccaauaacuaaugcuaagaaa

SEQ ID NO: 161 - RNA, 25 nt, Artificial Sequence
  Description of Artificial Sequence: Synthetic oligonucleotide
aaugcuaagaaaugcugaaaaucaa

SEQ ID NO: 162 - RNA, 25 nt, Artificial Sequence
  Description of Artificial Sequence: Synthetic oligonucleotide
gucuuucucuaaauaugauuacuuu

SEQ ID NO: 163 - RNA, 25 nt, Artificial Sequence
  Description of Artificial Sequence: Synthetic oligonucleotide
ugaauuucaggcauuuuguucuaca

SEQ ID NO: 164 - RNA, 25 nt, Artificial Sequence
  Description of Artificial Sequence: Synthetic oligonucleotide
cgauucccucucacccgggacucuc

SEQ ID NO: 165 - RNA, 25 nt, Artificial Sequence
  Description of Artificial Sequence: Synthetic oligonucleotide
aggaaagugaaccuuuaaaguaaag

SEQ ID NO: 166 - RNA, 25 nt, Artificial Sequence
  Description of Artificial Sequence: Synthetic oligonucleotide
gaggcugcaugcucuggaagccugg

SEQ ID NO: 167 - RNA, 25 nt, Artificial Sequence
  Description of Artificial Sequence: Synthetic oligonucleotide
ucucugaacagaaaacaaaagagag

SEQ ID NO: 168 - RNA, 25 nt, Artificial Sequence
  Description of Artificial Sequence: Synthetic oligonucleotide
aacuuggcuguaaucaguuaugccg

SEQ ID NO: 169 - RNA, 25 nt, Artificial Sequence
  Description of Artificial Sequence: Synthetic oligonucleotide
agaagccaaaauuaaaagaagucca

SEQ ID NO: 170 - RNA, 25 nt, Artificial Sequence
  Description of Artificial Sequence: Synthetic oligonucleotide
auuaaaagaaguccaggugagguua

SEQ ID NO: 171 - RNA, 25 nt, Artificial Sequence
  Description of Artificial Sequence: Synthetic oligonucleotide
gaauccggauuaucgggaagaggac

SEQ ID NO: 172 - RNA, 25 nt, Artificial Sequence
  Description of Artificial Sequence: Synthetic oligonucleotide
aaugugacaucaaagcaaguauugu

SEQ ID NO: 173 - RNA, 25 nt, Artificial Sequence
  Description of Artificial Sequence: Synthetic oligonucleotide
caucaaagcaaguauuguagcacuc

SEQ ID NO: 174 - RNA, 25 nt, Artificial Sequence
  Description of Artificial Sequence: Synthetic oligonucleotide
agagagagaaaacaaaaccacaaau

SEQ ID NO: 175 - RNA, 25 nt, Artificial Sequence
  Description of Artificial Sequence: Synthetic oligonucleotide
ucgcuguaguauuuaagcccauaca

SEQ ID NO: 176 - RNA, 25 nt, Artificial Sequence
  Description of Artificial Sequence: Synthetic oligonucleotide
cgcuguaguauuuaagcccauacag

SEQ ID NO: 177 - RNA, 25 nt, Artificial Sequence
  Description of Artificial Sequence: Synthetic oligonucleotide
auuuaagcccauacagaaaccuucc

SEQ ID NO: 178 - RNA, 25 nt, Artificial Sequence
  Description of Artificial Sequence: Synthetic oligonucleotide
auuaaaauaaacaugguauaccuac

SEQ ID NO: 179 - RNA, 25 nt, Artificial Sequence
  Description of Artificial Sequence: Synthetic oligonucleotide
cuguucugaucggccaguuuucgga

SEQ ID NO: 180 - RNA, 25 nt, Artificial Sequence
  Description of Artificial Sequence: Synthetic oligonucleotide
aaauaauuugaacuuuggaacaggg

SEQ ID NO: 181 - RNA, 25 nt, Artificial Sequence
  Description of Artificial Sequence: Synthetic oligonucleotide
ugcgaccuuaauuuaacuuuccagu

SEQ ID NO: 182 - RNA, 25 nt, Artificial Sequence
  Description of Artificial Sequence: Synthetic oligonucleotide
cugagaaagcuaaaguuugguuuug

SEQ ID NO: 183 - RNA, 25 nt, Artificial Sequence
  Description of Artificial Sequence: Synthetic oligonucleotide
aguaaagaugcuacuucccacugua

SEQ ID NO: 184 - RNA, 25 nt, Artificial Sequence
  Description of Artificial Sequence: Synthetic oligonucleotide
cugcuuaauugcugauaccauauga

SEQ ID NO: 185 - RNA, 25 nt, Artificial Sequence
  Description of Artificial Sequence: Synthetic oligonucleotide
uaccauaugaaugaaacaugggcug

SEQ ID NO: 186 - RNA, 25 nt, Artificial Sequence
  Description of Artificial Sequence: Synthetic oligonucleotide
aacuuucuuauccaacuuuuucaua

SEQ ID NO: 187 - RNA, 25 nt, Artificial Sequence
  Description of Artificial Sequence: Synthetic oligonucleotide
ccuugcaugacaucaugaggccgga

SEQ ID NO: 188 - RNA, 25 nt, Artificial Sequence
  Description of Artificial Sequence: Synthetic oligonucleotide
ugaauuuguauaugacugcauuugu

SEQ ID NO: 189 - RNA, 25 nt, Artificial Sequence
  Description of Artificial Sequence: Synthetic oligonucleotide
gaauccuaguagaauguuuacuacc

SEQ ID NO: 190 - RNA, 25 nt, Artificial Sequence
  Description of Artificial Sequence: Synthetic oligonucleotide
gaaagggaagaauuuuuugaugaaa

SEQ ID NO: 191 - RNA, 25 nt, Artificial Sequence
  Description of Artificial Sequence: Synthetic oligonucleotide
uaucggcaugccagugugugaauuu

SEQ ID NO: 192 - RNA, 25 nt, Artificial Sequence
  Description of Artificial Sequence: Synthetic oligonucleotide
caccucauaguagagcaauguaugu

SEQ ID NO: 193 - RNA, 25 nt, Artificial Sequence
  Description of Artificial Sequence: Synthetic oligonucleotide
ccagaauugccaaagcacauauaua

SEQ ID NO: 194 - RNA, 25 nt, Artificial Sequence
  Description of Artificial Sequence: Synthetic oligonucleotide
uggugaucuggguaauaguuucucc

SEQ ID NO: 195 - RNA, 25 nt, Artificial Sequence
  Description of Artificial Sequence: Synthetic oligonucleotide
gaucuggguaauaguuucuccaaau

SEQ ID NO: 196 - RNA, 25 nt, Artificial Sequence
  Description of Artificial Sequence: Synthetic oligonucleotide
ggaugugaugaauacuuccuagaaa

SEQ ID NO: 197 - RNA, 25 nt, Artificial Sequence
  Description of Artificial Sequence: Synthetic oligonucleotide
cauuuccacagcuacaccauauaug

SEQ ID NO: 198 - RNA, 25 nt, Artificial Sequence
  Description of Artificial Sequence: Synthetic oligonucleotide
acagcuacaccauauaugaauggag

SEQ ID NO: 199 - RNA, 25 nt, Artificial Sequence
  Description of Artificial Sequence: Synthetic oligonucleotide
ugcaguucuuacacgagaagaagau

SEQ ID NO: 200 - RNA, 25 nt, Artificial Sequence
  Description of Artificial Sequence: Synthetic oligonucleotide
acgagaagaagaucauuuacaggga

SEQ ID NO: 201 - RNA, 25 nt, Artificial Sequence
  Description of Artificial Sequence: Synthetic oligonucleotide
cgagaagaagaucauuuacagggac

SEQ ID NO: 202 - RNA, 25 nt, Artificial Sequence
  Description of Artificial Sequence: Synthetic oligonucleotide
aagaagaucauuuacagggaccuga

SEQ ID NO: 203 - RNA, 25 nt, Artificial Sequence
  Description of Artificial Sequence: Synthetic oligonucleotide
agaggaagagguguuugacugcauc

SEQ ID NO: 204 - RNA, 25 nt, Artificial Sequence
  Description of Artificial Sequence: Synthetic oligonucleotide
gaggaagagguguuugacugcaucg

SEQ ID NO: 205 - RNA, 25 nt, Artificial Sequence
  Description of Artificial Sequence: Synthetic oligonucleotide
cuacuuugagggcgaguucacaggg

SEQ ID NO: 206 - RNA, 25 nt, Artificial Sequence
  Description of Artificial Sequence: Synthetic oligonucleotide
agggcaucuccuggcaccucugucc

SEQ ID NO: 207 - RNA, 25 nt, Artificial Sequence
  Description of Artificial Sequence: Synthetic oligonucleotide
ggagugauaugguuugucuuuuuaa

SEQ ID NO: 208 - RNA, 25 nt, Artificial Sequence
  Description of Artificial Sequence: Synthetic oligonucleotide
gagugauaugguuugucuuuuuaag

SEQ ID NO: 209 - RNA, 25 nt, Artificial Sequence
  Description of Artificial Sequence: Synthetic oligonucleotide
ugcaguaaagauccuaaagguuguc

SEQ ID NO: 210 - RNA, 25 nt, Artificial Sequence
  Description of Artificial Sequence: Synthetic oligonucleotide
aguaaagauccuaaagguugucgac

SEQ ID NO: 211 - RNA, 25 nt, Artificial Sequence
  Description of Artificial Sequence: Synthetic oligonucleotide
ugacaaaggacaaccuggcaauugu

SEQ ID NO: 212 - RNA, 25 nt, Artificial Sequence
  Description of Artificial Sequence: Synthetic oligonucleotide
gcaauugugacccaguggugcgagg

SEQ ID NO: 213 - RNA, 25 nt, Artificial Sequence
  Description of Artificial Sequence: Synthetic oligonucleotide
aacaucauccauagagacaugaaau

SEQ ID NO: 214 - RNA, 25 nt, Artificial Sequence
  Description of Artificial Sequence: Synthetic oligonucleotide
ugaaauccaacaauauauuucucca

SEQ ID NO: 215 - RNA, 25 nt, Artificial Sequence
  Description of Artificial Sequence: Synthetic oligonucleotide
aacaauauauuucuccaugaaggcu

SEQ ID NO: 216 - RNA, 25 nt, Artificial Sequence
  Description of Artificial Sequence: Synthetic oligonucleotide
aacaguaaagucacgcuggaguggu

SEQ ID NO: 217 - RNA, 25 nt, Artificial Sequence
  Description of Artificial Sequence: Synthetic oligonucleotide
ugugaagaaaguaaaggaagagagg

SEQ ID NO: 218 - RNA, 25 nt, Artificial Sequence
  Description of Artificial Sequence: Synthetic oligonucleotide
cuuccgagccauccuugcaucgggc

SEQ ID NO: 219 - RNA, 25 nt, Artificial Sequence
  Description of Artificial Sequence: Synthetic oligonucleotide
aauggagguugaauauccuacugug

SEQ ID NO: 220 - RNA, 25 nt, Artificial Sequence
  Description of Artificial Sequence: Synthetic oligonucleotide
ggagguugaauauccuacuguguaa

SEQ ID NO: 221 - RNA, 25 nt, Artificial Sequence
  Description of Artificial Sequence: Synthetic oligonucleotide
auuuugaguuuucccuuguagugua

SEQ ID NO: 222 - RNA, 25 nt, Artificial Sequence
  Description of Artificial Sequence: Synthetic oligonucleotide
uauccuguuuguucuuuguugauug

SEQ ID NO: 223 - RNA, 25 nt, Artificial Sequence
  Description of Artificial Sequence: Synthetic oligonucleotide
ccuguuuguucuuuguugauugaaa

SEQ ID NO: 224 - RNA, 25 nt, Artificial Sequence
  Description of Artificial Sequence: Synthetic oligonucleotide
cucuacagccuucuuuuucuuccau

SEQ ID NO: 225 - RNA, 25 nt, Artificial Sequence
  Description of Artificial Sequence: Synthetic oligonucleotide
ucuuccauagcuaaucuuccuucua

SEQ ID NO: 226 - RNA, 25 nt, Artificial Sequence
  Description of Artificial Sequence: Synthetic oligonucleotide
auaaucuuccuguugaaugcuucau

SEQ ID NO: 227 - RNA, 25 nt, Artificial Sequence
  Description of Artificial Sequence: Synthetic oligonucleotide
uaaucuuccuguugaaugcuucaug

SEQ ID NO: 228 - RNA, 25 nt, Artificial Sequence
  Description of Artificial Sequence: Synthetic oligonucleotide
cuucaugacuugaauucuacuuuga

SEQ ID NO: 229 - RNA, 25 nt, Artificial Sequence
  Description of Artificial Sequence: Synthetic oligonucleotide
aagagggagagaagcaacuacagac

SEQ ID NO: 230 - RNA, 25 nt, Artificial Sequence
  Description of Artificial Sequence: Synthetic oligonucleotide
cgucuccuaccagaccaaggucaac

SEQ ID NO: 231 - RNA, 25 nt, Artificial Sequence
  Description of Artificial Sequence: Synthetic oligonucleotide
gaucaaucggcccgacuaucucgac

SEQ ID NO: 232 - RNA, 25 nt, Artificial Sequence
  Description of Artificial Sequence: Synthetic oligonucleotide
ggacgaacauccaaccuucccaaac

SEQ ID NO: 233 - RNA, 25 nt, Artificial Sequence
  Description of Artificial Sequence: Synthetic oligonucleotide
agggucggaacccaagcuuagaacu

SEQ ID NO: 234 - RNA, 25 nt, Artificial Sequence
  Description of Artificial Sequence: Synthetic oligonucleotide
ucggaacccaagcuuagaacuuuaa

SEQ ID NO: 235 - RNA, 25 nt, Artificial Sequence
  Description of Artificial Sequence: Synthetic oligonucleotide
acccaagcuuagaacuuuaagcaac

SEQ ID NO: 236 - RNA, 25 nt, Artificial Sequence
  Description of Artificial Sequence: Synthetic oligonucleotide
gaacuuuaagcaacaagaccaccac

SEQ ID NO: 237 - RNA, 25 nt, Artificial Sequence
  Description of Artificial Sequence: Synthetic oligonucleotide
acuauucaguggcgagaaauaaagu

SEQ ID NO: 238 - RNA, 25 nt, Artificial Sequence
  Description of Artificial Sequence: Synthetic oligonucleotide
cuauucaguggcgagaaauaaaguu

SEQ ID NO: 239 - RNA, 25 nt, Artificial Sequence
  Description of Artificial Sequence: Synthetic oligonucleotide
aaacacagauaacaggaaaugaucc

SEQ ID NO: 240 - RNA, 25 nt, Artificial Sequence
  Description of Artificial Sequence: Synthetic oligonucleotide
cuuaagaaaagagaagaaaugaaac

SEQ ID NO: 241 - RNA, 25 nt, Artificial Sequence
  Description of Artificial Sequence: Synthetic oligonucleotide
cugaaggaguguguuuccauccucc

SEQ ID NO: 242 - RNA, 25 nt, Artificial Sequence
  Description of Artificial Sequence: Synthetic oligonucleotide
ucaccgcgggacugaaaaucuuuga

SEQ ID NO: 243 - RNA, 25 nt, Artificial Sequence
  Description of Artificial Sequence: Synthetic oligonucleotide
agcagaaauaagcgugccguucagg

SEQ ID NO: 244 - RNA, 25 nt, Artificial Sequence
  Description of Artificial Sequence: Synthetic oligonucleotide
aagcgugccguucaggguccagaag

SEQ ID NO: 245 - RNA, 25 nt, Artificial Sequence
  Description of Artificial Sequence: Synthetic oligonucleotide
agaaacagucacucaagacugcuug

SEQ ID NO: 246 - RNA, 25 nt, Artificial Sequence
  Description of Artificial Sequence: Synthetic oligonucleotide
agaggaagaagguccaugucuuugg

SEQ ID NO: 247 - RNA, 25 nt, Artificial Sequence
  Description of Artificial Sequence: Synthetic oligonucleotide
uguauucaaaauaugccugaaacac

SEQ ID NO: 248 - RNA, 25 nt, Artificial Sequence
  Description of Artificial Sequence: Synthetic oligonucleotide
auuuuccucccuuucucuguaccuc

SEQ ID NO: 249 - RNA, 25 nt, Artificial Sequence
  Description of Artificial Sequence: Synthetic oligonucleotide
caaagaaagauagagcaagacaaga

SEQ ID NO: 250 - RNA, 25 nt, Artificial Sequence
  Description of Artificial Sequence: Synthetic oligonucleotide
aagaaagauagagcaagacaagaaa

SEQ ID NO: 251 - RNA, 25 nt, Artificial Sequence
  Description of Artificial Sequence: Synthetic oligonucleotide
gaaagcauuuguuuguacaagaucc

SEQ ID NO: 252 - RNA, 25 nt, Artificial Sequence
  Description of Artificial Sequence: Synthetic oligonucleotide
ugaguuaaacgaacguacuugcaga

SEQ ID NO: 253 - RNA, 25 nt, Artificial Sequence
  Description of Artificial Sequence: Synthetic oligonucleotide
acugauacagaacgaucgauacaga

SEQ ID NO: 254 - RNA, 25 nt, Artificial Sequence
  Description of Artificial Sequence: Synthetic oligonucleotide
auauuauauauauauaaaaauaaau

SEQ ID NO: 255 - RNA, 25 nt, Artificial Sequence
  Description of Artificial Sequence: Synthetic oligonucleotide
auuauauauauauaaaaauaaauau

SEQ ID NO: 256 - RNA, 25 nt, Artificial Sequence
  Description of Artificial Sequence: Synthetic oligonucleotide
ucacuggauguauuugacugcugug

SEQ ID NO: 257 - RNA, 25 nt, Artificial Sequence
  Description of Artificial Sequence: Synthetic oligonucleotide
cagggaagaggaggagaugagagac

SEQ ID NO: 258 - RNA, 25 nt, Artificial Sequence
  Description of Artificial Sequence: Synthetic oligonucleotide
augaucuuuuuuuugucccacuugg

SEQ ID NO: 259 - RNA, 27 nt, Artificial Sequence
  Description of Artificial Sequence: Synthetic oligonucleotide
ggccgugaacuccucaucaaaauaccu

SEQ ID NO: 260 - RNA, 27 nt, Artificial Sequence
  Description of Artificial Sequence: Synthetic oligonucleotide
uggugugauggugaucaucugggccgu

SEQ ID NO: 261 - RNA, 27 nt, Artificial Sequence
  Description of Artificial Sequence: Synthetic oligonucleotide
aaacccgcaggauaguuuucuucccua

SEQ ID NO: 262 - RNA, 27 nt, Artificial Sequence
  Description of Artificial Sequence: Synthetic oligonucleotide
caaacuggaugaaauaaauuaaaaccc

SEQ ID NO: 263 - RNA, 27 nt, Artificial Sequence
  Description of Artificial Sequence: Synthetic oligonucleotide
agaaguccuuaacauuucccuacguga

SEQ ID NO: 264 - RNA, 27 nt, Artificial Sequence
  Description of Artificial Sequence: Synthetic oligonucleotide
cucugucccacuggguaaacccuggcc

SEQ ID NO: 265 - RNA, 27 nt, Artificial Sequence
  Description of Artificial Sequence: Synthetic oligonucleotide
cacaauaacaaauuuaaaccuugcucc

SEQ ID NO: 266 - RNA, 27 nt, Artificial Sequence
  Description of Artificial Sequence: Synthetic oligonucleotide
aaaugcauuugaacaacauaauacaca

SEQ ID NO: 267 - RNA, 27 nt, Artificial Sequence
  Description of Artificial Sequence: Synthetic oligonucleotide
ggcuuuccugucacaaagauuaaaaac

SEQ ID NO: 268 - RNA, 27 nt, Artificial Sequence
  Description of Artificial Sequence: Synthetic oligonucleotide
agggcuuuccugucacaaagauuaaaa

SEQ ID NO: 269 - RNA, 27 nt, Artificial Sequence
  Description of Artificial Sequence: Synthetic oligonucleotide
ggccaugcugggagacauaagcagcag

SEQ ID NO: 270 - RNA, 27 nt, Artificial Sequence
  Description of Artificial Sequence: Synthetic oligonucleotide
ucagggagaagcuucugaaacacuucu

SEQ ID NO: 271 - RNA, 27 nt, Artificial Sequence
  Description of Artificial Sequence: Synthetic oligonucleotide
aagggcuucuuccuuauugauggucag

SEQ ID NO: 272 - RNA, 27 nt, Artificial Sequence
  Description of Artificial Sequence: Synthetic oligonucleotide
ugaagggcuucuuccuuauugaugguc

SEQ ID NO: 273 - RNA, 27 nt, Artificial Sequence
  Description of Artificial Sequence: Synthetic oligonucleotide
cgcugaagggcuucuuccuuauugaug

SEQ ID NO: 274 - RNA, 27 nt, Artificial Sequence
  Description of Artificial Sequence: Synthetic oligonucleotide
gccgcugaagggcuucuuccuuauuga

SEQ ID NO: 275 - RNA, 27 nt, Artificial Sequence
  Description of Artificial Sequence: Synthetic oligonucleotide
acuggccgcugaagggcuucuuccuua

SEQ ID NO: 276 - RNA, 27 nt, Artificial Sequence
  Description of Artificial Sequence: Synthetic oligonucleotide
cggagcuuuucaccuuuaguuaugcuu

SEQ ID NO: 277 - RNA, 27 nt, Artificial Sequence
  Description of Artificial Sequence: Synthetic oligonucleotide
ccggagcuuuucaccuuuaguuaugcu

SEQ ID NO: 278 - RNA, 27 nt, Artificial Sequence
  Description of Artificial Sequence: Synthetic oligonucleotide
cagacuguugacuggcgugauguaguu

SEQ ID NO: 279 - RNA, 27 nt, Artificial Sequence
  Description of Artificial Sequence: Synthetic oligonucleotide
cuuuugaacucugcuuaaauccagugg

SEQ ID NO: 280 - RNA, 27 nt, Artificial Sequence
  Description of Artificial Sequence: Synthetic oligonucleotide
gcuuuugaacucugcuuaaauccagug

SEQ ID NO: 281 - RNA, 27 nt, Artificial Sequence
  Description of Artificial Sequence: Synthetic oligonucleotide
agggcuuuugaacucugcuuaaaucca

SEQ ID NO: 282 - RNA, 27 nt, Artificial Sequence
  Description of Artificial Sequence: Synthetic oligonucleotide
aagggcuuuugaacucugcuuaaaucc

SEQ ID NO: 283 - RNA, 27 nt, Artificial Sequence
  Description of Artificial Sequence: Synthetic oligonucleotide
ugaagggcuuuugaacucugcuuaaau

SEQ ID NO: 284 - RNA, 27 nt, Artificial Sequence
  Description of Artificial Sequence: Synthetic oligonucleotide
cugaagggcuuuugaacucugcuuaaa

SEQ ID NO: 285 - RNA, 27 nt, Artificial Sequence
  Description of Artificial Sequence: Synthetic oligonucleotide
cgcugaagggcuuuugaacucugcuua

SEQ ID NO: 286 - RNA, 27 nt, Artificial Sequence
  Description of Artificial Sequence: Synthetic oligonucleotide
cgagcggcuucacucagacccugaggc

SEQ ID NO: 287 - RNA, 27 nt, Artificial Sequence
  Description of Artificial Sequence: Synthetic oligonucleotide
uugacuggcgugauguaguugcuuggg

SEQ ID NO: 288 - RNA, 27 nt, Artificial Sequence
  Description of Artificial Sequence: Synthetic oligonucleotide
cacgcaccaagaagcugccauugaucc

SEQ ID NO: 289 - RNA, 27 nt, Artificial Sequence
  Description of Artificial Sequence: Synthetic oligonucleotide
cugaugaauccaaugugggcuggaauc

SEQ ID NO: 290 - RNA, 27 nt, Artificial Sequence
  Description of Artificial Sequence: Synthetic oligonucleotide
cuuagguauuccacauucucagcugug

SEQ ID NO: 291 - RNA, 27 nt, Artificial Sequence
  Description of Artificial Sequence: Synthetic oligonucleotide
ugagccucaaauuaggagauacguuuu

SEQ ID NO: 292 - RNA, 27 nt, Artificial Sequence
  Description of Artificial Sequence: Synthetic oligonucleotide
ccaauuguagagaaauuauuuuaggaa

SEQ ID NO: 293 - RNA, 27 nt, Artificial Sequence
  Description of Artificial Sequence: Synthetic oligonucleotide
ggcuccuaacuagcugaaucuuccaau

SEQ ID NO: 294 - RNA, 27 nt, Artificial Sequence
  Description of Artificial Sequence: Synthetic oligonucleotide
guggauauugacuaggagaguuuaaaa

SEQ ID NO: 295 - RNA, 27 nt, Artificial Sequence
  Description of Artificial Sequence: Synthetic oligonucleotide
ugugacugaacauaacuguaggcugaa

SEQ ID NO: 296 - RNA, 27 nt, Artificial Sequence
  Description of Artificial Sequence: Synthetic oligonucleotide
guaugugugugugacugaacauaacug

SEQ ID NO: 297 - RNA, 27 nt, Artificial Sequence
  Description of Artificial Sequence: Synthetic oligonucleotide
aagcaaaaggaacauuuuguaugugug

SEQ ID NO: 298 - RNA, 27 nt, Artificial Sequence
  Description of Artificial Sequence: Synthetic oligonucleotide
aaaaauuacuuuaaaagcaaaaggaac

SEQ ID NO: 299 - RNA, 27 nt, Artificial Sequence
  Description of Artificial Sequence: Synthetic oligonucleotide
ccauugacuguugcuucacaggucaga

SEQ ID NO: 300 - RNA, 27 nt, Artificial Sequence
  Description of Artificial Sequence: Synthetic oligonucleotide
auugguuugucgaugugugagauaguu

SEQ ID NO: 301 - RNA, 27 nt, Artificial Sequence
  Description of Artificial Sequence: Synthetic oligonucleotide
agugguagcaguacaauugaggacaag

SEQ ID NO: 302 - RNA, 27 nt, Artificial Sequence
  Description of Artificial Sequence: Synthetic oligonucleotide
uaagaccgcuugccagcuacgguuuca

SEQ ID NO: 303 - RNA, 27 nt, Artificial Sequence
  Description of Artificial Sequence: Synthetic oligonucleotide
agccgguaagaccgcuugccagcuacg

SEQ ID NO: 304 - RNA, 27 nt, Artificial Sequence
  Description of Artificial Sequence: Synthetic oligonucleotide
gguaacccaucuuuuaaccauacaacu

SEQ ID NO: 305 - RNA, 27 nt, Artificial Sequence
  Description of Artificial Sequence: Synthetic oligonucleotide
ucgcagguaacccaucuuuuaaccaua

SEQ ID NO: 306 - RNA, 27 nt, Artificial Sequence
  Description of Artificial Sequence: Synthetic oligonucleotide
cucagcaagauuguauaauucccugca

SEQ ID NO: 307 - RNA, 27 nt, Artificial Sequence
  Description of Artificial Sequence: Synthetic oligonucleotide
acuguuuuaugcucagcaagauuguau

SEQ ID NO: 308 - RNA, 27 nt, Artificial Sequence
  Description of Artificial Sequence: Synthetic oligonucleotide
aggauaaaggacucuucauuauuggaa

SEQ ID NO: 309 - RNA, 27 nt, Artificial Sequence
  Description of Artificial Sequence: Synthetic oligonucleotide
caacuugcguuggaacauccaaagugu

SEQ ID NO: 310 - RNA, 27 nt, Artificial Sequence
  Description of Artificial Sequence: Synthetic oligonucleotide
augguuucaguuuaguggaagcauuua

SEQ ID NO: 311 - RNA, 27 nt, Artificial Sequence
  Description of Artificial Sequence: Synthetic oligonucleotide
auauuuaacaaagucaaacuuucucac

SEQ ID NO: 312 - RNA, 27 nt, Artificial Sequence
  Description of Artificial Sequence: Synthetic oligonucleotide
aacuuuuaauauacaguaguucuuuuc

SEQ ID NO: 313 - RNA, 27 nt, Artificial Sequence
  Description of Artificial Sequence: Synthetic oligonucleotide
guuaagucaaaacccguauuucuaaag

SEQ ID NO: 314 - RNA, 27 nt, Artificial Sequence
  Description of Artificial Sequence: Synthetic oligonucleotide
gugcugaguuugcuguacccauguuga

SEQ ID NO: 315 - RNA, 27 nt, Artificial Sequence
  Description of Artificial Sequence: Synthetic oligonucleotide
ugaggucagcaucuucugugucuuuac

SEQ ID NO: 316 - RNA, 27 nt, Artificial Sequence
  Description of Artificial Sequence: Synthetic oligonucleotide
gcgaucugaauaaaccucccuacuagc

SEQ ID NO: 317 - RNA, 27 nt, Artificial Sequence
  Description of Artificial Sequence: Synthetic oligonucleotide
aucccagaacccugcugcagaaggcca

SEQ ID NO: 318 - RNA, 27 nt, Artificial Sequence
  Description of Artificial Sequence: Synthetic oligonucleotide
cauaauuuccaauauguaccagaccuu

SEQ ID NO: 319 - RNA, 27 nt, Artificial Sequence
  Description of Artificial Sequence: Synthetic oligonucleotide
cuagugcuuccaucggaaggacuaggu

SEQ ID NO: 320 - RNA, 27 nt, Artificial Sequence
  Description of Artificial Sequence: Synthetic oligonucleotide
uccacauaaaaacaauauucacuggga

SEQ ID NO: 321 - RNA, 27 nt, Artificial Sequence
  Description of Artificial Sequence: Synthetic oligonucleotide
ucuaccaauuccaacuugaauucauug

SEQ ID NO: 322 - RNA, 27 nt, Artificial Sequence
  Description of Artificial Sequence: Synthetic oligonucleotide
ucuccaagucuaaaucuguguccugag

SEQ ID NO: 323 - RNA, 27 nt, Artificial Sequence
  Description of Artificial Sequence: Synthetic oligonucleotide
uggaauacuguaacugugcuuugagga

SEQ ID NO: 324 - RNA, 27 nt, Artificial Sequence
  Description of Artificial Sequence: Synthetic oligonucleotide
uuaauucaucagugguggcagugguag

SEQ ID NO: 325 - RNA, 27 nt, Artificial Sequence
  Description of Artificial Sequence: Synthetic oligonucleotide
gugaugauguggcacuaguaguuucuu

SEQ ID NO: 326 - RNA, 27 nt, Artificial Sequence
  Description of Artificial Sequence: Synthetic oligonucleotide
ucuguuuggugaggcuguccgacuuug

SEQ ID NO: 327 - RNA, 27 nt, Artificial Sequence
  Description of Artificial Sequence: Synthetic oligonucleotide
ccaucauguuccauuuuucgcuuucuc

SEQ ID NO: 328 - RNA, 27 nt, Artificial Sequence
  Description of Artificial Sequence: Synthetic oligonucleotide
gcagucuacaugcuaaaucagagggua

SEQ ID NO: 329 - RNA, 27 nt, Artificial Sequence
  Description of Artificial Sequence: Synthetic oligonucleotide
cauaaauagauccuuaaauagcucaaa

SEQ ID NO: 330 - RNA, 27 nt, Artificial Sequence
  Description of Artificial Sequence: Synthetic oligonucleotide
ugauaauagugcuuuuucaccuuuuuc

SEQ ID NO: 331 - RNA, 27 nt, Artificial Sequence
  Description of Artificial Sequence: Synthetic oligonucleotide
gcagaacugauaauagugcuuuuucac

SEQ ID NO: 332 - RNA, 27 nt, Artificial Sequence
  Description of Artificial Sequence: Synthetic oligonucleotide
guagguuuaaucuuucuuuucagccau

SEQ ID NO: 333 - RNA, 27 nt, Artificial Sequence
  Description of Artificial Sequence: Synthetic oligonucleotide
agaaggauuuuauuauaaggguuuaau

SEQ ID NO: 334 - RNA, 27 nt, Artificial Sequence
  Description of Artificial Sequence: Synthetic oligonucleotide
gucuacagcauuggcuaauaguaugaa

SEQ ID NO: 335 - RNA, 27 nt, Artificial Sequence
  Description of Artificial Sequence: Synthetic oligonucleotide
cuauuccuaucaaaaugcuucugucua

SEQ ID NO: 336 - RNA, 27 nt, Artificial Sequence
  Description of Artificial Sequence: Synthetic oligonucleotide
ucagggccauuaucuuauuugcucuau

SEQ ID NO: 337 - RNA, 27 nt, Artificial Sequence
  Description of Artificial Sequence: Synthetic oligonucleotide
ugcuugaggaagagaaaaauguugguc

SEQ ID NO: 338 - RNA, 27 nt, Artificial Sequence
  Description of Artificial Sequence: Synthetic oligonucleotide
ugggcugaacuuuucucauacuuaaag

SEQ ID NO: 339 - RNA, 27 nt, Artificial Sequence
  Description of Artificial Sequence: Synthetic oligonucleotide
gguucagcagccaucuuuauuccugcg

SEQ ID NO: 340 - RNA, 27 nt, Artificial Sequence
  Description of Artificial Sequence: Synthetic oligonucleotide
ugaagagaacuuggucauucaaauuuc

SEQ ID NO: 341 - RNA, 27 nt, Artificial Sequence
  Description of Artificial Sequence: Synthetic oligonucleotide
cucuaggcuggcuaucuuuauacauac

SEQ ID NO: 342 - RNA, 27 nt, Artificial Sequence
  Description of Artificial Sequence: Synthetic oligonucleotide
acacuucacagagauaguuacagccau

SEQ ID NO: 343 - RNA, 27 nt, Artificial Sequence
  Description of Artificial Sequence: Synthetic oligonucleotide
uugaaauuuucucacacuucacagaga

SEQ ID NO: 344 - RNA, 27 nt, Artificial Sequence
  Description of Artificial Sequence: Synthetic oligonucleotide
ucaggaggauucauuuccuuaaaggaa

SEQ ID NO: 345 - RNA, 27 nt, Artificial Sequence
  Description of Artificial Sequence: Synthetic oligonucleotide
auaugaugucacuuuuuguauccuuga

SEQ ID NO: 346 - RNA, 27 nt, Artificial Sequence
  Description of Artificial Sequence: Synthetic oligonucleotide
uaugaugaagauucaaauugcaucuua

SEQ ID NO: 347 - RNA, 27 nt, Artificial Sequence
  Description of Artificial Sequence: Synthetic oligonucleotide
uuaauagcuagucuucguuuugaacag

SEQ ID NO: 348 - RNA, 27 nt, Artificial Sequence
  Description of Artificial Sequence: Synthetic oligonucleotide
auuuuuaguagagaugagguuucacca

SEQ ID NO: 349 - RNA, 27 nt, Artificial Sequence
  Description of Artificial Sequence: Synthetic oligonucleotide
aggcgagauagagcuucucuuucguuc

SEQ ID NO: 350 - RNA, 27 nt, Artificial Sequence
  Description of Artificial Sequence: Synthetic oligonucleotide
aacuggaccgaaggcgcuuguggagaa

SEQ ID NO: 351 - RNA, 27 nt, Artificial Sequence
  Description of Artificial Sequence: Synthetic oligonucleotide
gcggcuacaucuuuggaaucuucuccu

SEQ ID NO: 352 - RNA, 27 nt, Artificial Sequence
  Description of Artificial Sequence: Synthetic oligonucleotide
caagucuccucauugaauccagauugg

SEQ ID NO: 353 - RNA, 27 nt, Artificial Sequence
  Description of Artificial Sequence: Synthetic oligonucleotide
uccucacuacucucaaaucuguucugg

SEQ ID NO: 354 - RNA, 27 nt, Artificial Sequence
  Description of Artificial Sequence: Synthetic oligonucleotide
uuuguacucaucugcacagcucuggcu

SEQ ID NO: 355 - RNA, 27 nt, Artificial Sequence
  Description of Artificial Sequence: Synthetic oligonucleotide
gcccauuaacaacaacaaucugaggug

SEQ ID NO: 356 - RNA, 27 nt, Artificial Sequence
  Description of Artificial Sequence: Synthetic oligonucleotide
aauaaauuaaaaauaauuaaaauagug

SEQ ID NO: 357 - RNA, 27 nt, Artificial Sequence
  Description of Artificial Sequence: Synthetic oligonucleotide
cauauuuaaauauuaauaaauuaaaaa

SEQ ID NO: 358 - RNA, 27 nt, Artificial Sequence
  Description of Artificial Sequence: Synthetic oligonucleotide
gaaacaaaggauauucaaacugcauag

SEQ ID NO: 359 - RNA, 27 nt, Artificial Sequence
  Description of Artificial Sequence: Synthetic oligonucleotide
caaacacuuagacgccagcagcauggg

SEQ ID NO: 360 - RNA, 27 nt, Artificial Sequence
  Description of Artificial Sequence: Synthetic oligonucleotide
uuugucacaggugaaaugcacaucuga

SEQ ID NO: 361 - RNA, 27 nt, Artificial Sequence
  Description of Artificial Sequence: Synthetic oligonucleotide
uaauucagccuggcacagguuuugauc

SEQ ID NO: 362 - RNA, 27 nt, Artificial Sequence
  Description of Artificial Sequence: Synthetic oligonucleotide
auuguaagaaugacuacccacauucac

SEQ ID NO: 363 - RNA, 27 nt, Artificial Sequence
  Description of Artificial Sequence: Synthetic oligonucleotide
caauuguaagaaugacuacccacauuc

SEQ ID NO: 364 - RNA, 27 nt, Artificial Sequence
  Description of Artificial Sequence: Synthetic oligonucleotide
guacacucucugaugcucauuuucaua

SEQ ID NO: 365 - RNA, 27 nt, Artificial Sequence
  Description of Artificial Sequence: Synthetic oligonucleotide
cugcugaguucuacaugaaaagcaaau

SEQ ID NO: 366 - RNA, 27 nt, Artificial Sequence
  Description of Artificial Sequence: Synthetic oligonucleotide
uacugaaaauaaauauagaaauacaac

SEQ ID NO: 367 - RNA, 27 nt, Artificial Sequence
  Description of Artificial Sequence: Synthetic oligonucleotide
uuccauuuaagaaacauuaaucaaaac

SEQ ID NO: 368 - RNA, 27 nt, Artificial Sequence
  Description of Artificial Sequence: Synthetic oligonucleotide
acaauuuuaggcacuauacacguuguu

SEQ ID NO: 369 - RNA, 27 nt, Artificial Sequence
  Description of Artificial Sequence: Synthetic oligonucleotide
ccagauguuaguagccaaggauauggu

SEQ ID NO: 370 - RNA, 27 nt, Artificial Sequence
  Description of Artificial Sequence: Synthetic oligonucleotide
agcucacagucuccagauguuaguagc

SEQ ID NO: 371 - RNA, 27 nt, Artificial Sequence
  Description of Artificial Sequence: Synthetic oligonucleotide
auuaauaaaaagcacacaacuuauggc

SEQ ID NO: 372 - RNA, 27 nt, Artificial Sequence
  Description of Artificial Sequence: Synthetic oligonucleotide
aauguaagaagagccaaaaugaugcau

SEQ ID NO: 373 - RNA, 27 nt, Artificial Sequence
  Description of Artificial Sequence: Synthetic oligonucleotide
acauuuuuacaaauguaagaagagcca

SEQ ID NO: 374 - RNA, 27 nt, Artificial Sequence
  Description of Artificial Sequence: Synthetic oligonucleotide
aauaugaauuaagaugaccuaaucugu

SEQ ID NO: 375 - RNA, 27 nt, Artificial Sequence
  Description of Artificial Sequence: Synthetic oligonucleotide
ucaugauuaguucuuucaauuccaucc

SEQ ID NO: 376 - RNA, 27 nt, Artificial Sequence
  Description of Artificial Sequence: Synthetic oligonucleotide
cccaagagcagaaggaaugagugugca

SEQ ID NO: 377 - RNA, 27 nt, Artificial Sequence
  Description of Artificial Sequence: Synthetic oligonucleotide
cucaaagcuacugguuaccucuacacc

SEQ ID NO: 378 - RNA, 27 nt, Artificial Sequence
  Description of Artificial Sequence: Synthetic oligonucleotide
ugaaauauuacguggcaugugguuggg

SEQ ID NO: 379 - RNA, 27 nt, Artificial Sequence
  Description of Artificial Sequence: Synthetic oligonucleotide
agugaagagaauaacuuguuuccgaag

SEQ ID NO: 380 - RNA, 27 nt, Artificial Sequence
  Description of Artificial Sequence: Synthetic oligonucleotide
uuucuuagcauuaguuauugggaguga

SEQ ID NO: 381 - RNA, 27 nt, Artificial Sequence
  Description of Artificial Sequence: Synthetic oligonucleotide
uugauuuucagcauuucuuagcauuag

SEQ ID NO: 382 - RNA, 27 nt, Artificial Sequence
  Description of Artificial Sequence: Synthetic oligonucleotide
aaaguaaucauauuuagagaaagacag

SEQ ID NO: 383 - RNA, 27 nt, Artificial Sequence
  Description of Artificial Sequence: Synthetic oligonucleotide
uguagaacaaaaugccugaaauucagc

SEQ ID NO: 384 - RNA, 27 nt, Artificial Sequence
  Description of Artificial Sequence: Synthetic oligonucleotide
gagagucccgggugagagggaaucgcc

SEQ ID NO: 385 - RNA, 27 nt, Artificial Sequence
  Description of Artificial Sequence: Synthetic oligonucleotide
cuuuacuuuaaagguucacuuuccuug

SEQ ID NO: 386 - RNA, 27 nt, Artificial Sequence
  Description of Artificial Sequence: Synthetic oligonucleotide
ccaggcuuccagagcaugcagccuccu

SEQ ID NO: 387 - RNA, 27 nt, Artificial Sequence
  Description of Artificial Sequence: Synthetic oligonucleotide
cucucuuuuguuuucuguucagagaaa

SEQ ID NO: 388 - RNA, 27 nt, Artificial Sequence
  Description of Artificial Sequence: Synthetic oligonucleotide
cggcauaacugauuacagccaaguuca

SEQ ID NO: 389 - RNA, 27 nt, Artificial Sequence
  Description of Artificial Sequence: Synthetic oligonucleotide
uggacuucuuuuaauuuuggcuucuuc

SEQ ID NO: 390 - RNA, 27 nt, Artificial Sequence
  Description of Artificial Sequence: Synthetic oligonucleotide
uaaccucaccuggacuucuuuuaauuu

SEQ ID NO: 391 - RNA, 27 nt, Artificial Sequence
  Description of Artificial Sequence: Synthetic oligonucleotide
guccucuucccgauaauccggauucag

SEQ ID NO: 392 - RNA, 27 nt, Artificial Sequence
  Description of Artificial Sequence: Synthetic oligonucleotide
acaauacuugcuuugaugucacauuaa

SEQ ID NO: 393 - RNA, 27 nt, Artificial Sequence
  Description of Artificial Sequence: Synthetic oligonucleotide
gagugcuacaauacuugcuuugauguc

SEQ ID NO: 394 - RNA, 27 nt, Artificial Sequence
  Description of Artificial Sequence: Synthetic oligonucleotide
auuugugguuuuguuuucucucucucu

SEQ ID NO: 395 - RNA, 27 nt, Artificial Sequence
  Description of Artificial Sequence: Synthetic oligonucleotide
uguaugggcuuaaauacuacagcgagg

SEQ ID NO: 396 - RNA, 27 nt, Artificial Sequence
  Description of Artificial Sequence: Synthetic oligonucleotide
cuguaugggcuuaaauacuacagcgag

SEQ ID NO: 397 - RNA, 27 nt, Artificial Sequence
  Description of Artificial Sequence: Synthetic oligonucleotide
ggaagguuucuguaugggcuuaaauac

SEQ ID NO: 398 - RNA, 27 nt, Artificial Sequence
  Description of Artificial Sequence: Synthetic oligonucleotide
guagguauaccauguuuauuuuaauac

SEQ ID NO: 399 - RNA, 27 nt, Artificial Sequence
  Description of Artificial Sequence: Synthetic oligonucleotide
uccgaaaacuggccgaucagaacagcc

SEQ ID NO: 400 - RNA, 27 nt, Artificial Sequence
  Description of Artificial Sequence: Synthetic oligonucleotide
cccuguuccaaaguucaaauuauuugu

SEQ ID NO: 401 - RNA, 27 nt, Artificial Sequence
  Description of Artificial Sequence: Synthetic oligonucleotide
acuggaaaguuaaauuaaggucgcaau

SEQ ID NO: 402 - RNA, 27 nt, Artificial Sequence
  Description of Artificial Sequence: Synthetic oligonucleotide
caaaaccaaacuuuagcuuucucagcc

SEQ ID NO: 403 - RNA, 27 nt, Artificial Sequence
  Description of Artificial Sequence: Synthetic oligonucleotide
uacagugggaaguagcaucuuuacuuu

SEQ ID NO: 404 - RNA, 27 nt, Artificial Sequence
  Description of Artificial Sequence: Synthetic oligonucleotide
ucauaugguaucagcaauuaagcagua

SEQ ID NO: 405 - RNA, 27 nt, Artificial Sequence
  Description of Artificial Sequence: Synthetic oligonucleotide
cagcccauguuucauucauaugguauc

SEQ ID NO: 406 - RNA, 27 nt, Artificial Sequence
  Description of Artificial Sequence: Synthetic oligonucleotide
uaugaaaaaguuggauaagaaaguugg

SEQ ID NO: 407 - RNA, 27 nt, Artificial Sequence
  Description of Artificial Sequence: Synthetic oligonucleotide
uccggccucaugaugucaugcaaggcu

SEQ ID NO: 408 - RNA, 27 nt, Artificial Sequence
  Description of Artificial Sequence: Synthetic oligonucleotide
acaaaugcagucauauacaaauucagg

SEQ ID NO: 409 - RNA, 27 nt, Artificial Sequence
  Description of Artificial Sequence: Synthetic oligonucleotide
gguaguaaacauucuacuaggauucuu

SEQ ID NO: 410 - RNA, 27 nt, Artificial Sequence
  Description of Artificial Sequence: Synthetic oligonucleotide
uuucaucaaaaaauucuucccuuucug

SEQ ID NO: 411 - RNA, 27 nt, Artificial Sequence
  Description of Artificial Sequence: Synthetic oligonucleotide
aaauucacacacuggcaugccgauagc

SEQ ID NO: 412 - RNA, 27 nt, Artificial Sequence
  Description of Artificial Sequence: Synthetic oligonucleotide
acauacauugcucuacuaugaggugaa

SEQ ID NO: 413 - RNA, 27 nt, Artificial Sequence
  Description of Artificial Sequence: Synthetic oligonucleotide
uauauaugugcuuuggcaauucuggug

SEQ ID NO: 414 - RNA, 27 nt, Artificial Sequence
  Description of Artificial Sequence: Synthetic oligonucleotide
ggagaaacuauuacccagaucaccacu

SEQ ID NO: 415 - RNA, 27 nt, Artificial Sequence
  Description of Artificial Sequence: Synthetic oligonucleotide
auuuggagaaacuauuacccagaucac

SEQ ID NO: 416 - RNA, 27 nt, Artificial Sequence
  Description of Artificial Sequence: Synthetic oligonucleotide
uuucuaggaaguauucaucacauccac

SEQ ID NO: 417 - RNA, 27 nt, Artificial Sequence
  Description of Artificial Sequence: Synthetic oligonucleotide
cauauaugguguagcuguggaaaugcg

SEQ ID NO: 418 - RNA, 27 nt, Artificial Sequence
  Description of Artificial Sequence: Synthetic oligonucleotide
cuccauucauauaugguguagcugugg

SEQ ID NO: 419 - RNA, 27 nt, Artificial Sequence
  Description of Artificial Sequence: Synthetic oligonucleotide
aucuucuucucguguaagaacugcagc

SEQ ID NO: 420 - RNA, 27 nt, Artificial Sequence
  Description of Artificial Sequence: Synthetic oligonucleotide
ucccuguaaaugaucuucuucucgugu

SEQ ID NO: 421 - RNA, 27 nt, Artificial Sequence
  Description of Artificial Sequence: Synthetic oligonucleotide
gucccuguaaaugaucuucuucucgug

SEQ ID NO: 422 - RNA, 27 nt, Artificial Sequence
  Description of Artificial Sequence: Synthetic oligonucleotide
ucaggucccuguaaaugaucuucuucu

SEQ ID NO: 423 - RNA, 27 nt, Artificial Sequence
  Description of Artificial Sequence: Synthetic oligonucleotide
gaugcagucaaacaccucuuccucugu

SEQ ID NO: 424 - RNA, 27 nt, Artificial Sequence
  Description of Artificial Sequence: Synthetic oligonucleotide
cgaugcagucaaacaccucuuccucug

SEQ ID NO: 425 - RNA, 27 nt, Artificial Sequence
  Description of Artificial Sequence: Synthetic oligonucleotide
cccugugaacucgcccucaaaguagcg

SEQ ID NO: 426 - RNA, 27 nt, Artificial Sequence
  Description of Artificial Sequence: Synthetic oligonucleotide
ggacagaggugccaggagaugcccuca

SEQ ID NO: 427 - RNA, 27 nt, Artificial Sequence
  Description of Artificial Sequence: Synthetic oligonucleotide
uuaaaaagacaaaccauaucacuccuu

SEQ ID NO: 428 - RNA, 27 nt, Artificial Sequence
  Description of Artificial Sequence: Synthetic oligonucleotide
cuuaaaaagacaaaccauaucacuccu

SEQ ID NO: 429 - RNA, 27 nt, Artificial Sequence
  Description of Artificial Sequence: Synthetic oligonucleotide
gacaaccuuuaggaucuuuacugcaac

SEQ ID NO: 430 - RNA, 27 nt, Artificial Sequence
  Description of Artificial Sequence: Synthetic oligonucleotide
gucgacaaccuuuaggaucuuuacugc

SEQ ID NO: 431 - RNA, 27 nt, Artificial Sequence
  Description of Artificial Sequence: Synthetic oligonucleotide
acaauugccagguuguccuuugucaug

SEQ ID NO: 432 - RNA, 27 nt, Artificial Sequence
  Description of Artificial Sequence: Synthetic oligonucleotide
ccucgcaccacugggucacaauugcca

SEQ ID NO: 433 - RNA, 27 nt, Artificial Sequence
  Description of Artificial Sequence: Synthetic oligonucleotide
auuucaugucucuauggaugauguucu

SEQ ID NO: 434 - RNA, 27 nt, Artificial Sequence
  Description of Artificial Sequence: Synthetic oligonucleotide
uggagaaauauauuguuggauuucaug

SEQ ID NO: 435 - RNA, 27 nt, Artificial Sequence
  Description of Artificial Sequence: Synthetic oligonucleotide
agccuucauggagaaauauauuguugg

SEQ ID NO: 436 - RNA, 27 nt, Artificial Sequence
  Description of Artificial Sequence: Synthetic oligonucleotide
accacuccagcgugacuuuacuguugc

SEQ ID NO: 437 - RNA, 27 nt, Artificial Sequence
  Description of Artificial Sequence: Synthetic oligonucleotide
ccucucuuccuuuacuuucuucacaca

SEQ ID NO: 438 - RNA, 27 nt, Artificial Sequence
  Description of Artificial Sequence: Synthetic oligonucleotide
gcccgaugcaaggauggcucggaagcg

SEQ ID NO: 439 - RNA, 27 nt, Artificial Sequence
  Description of Artificial Sequence: Synthetic oligonucleotide
cacaguaggauauucaaccuccauuuc

SEQ ID NO: 440 - RNA, 27 nt, Artificial Sequence
  Description of Artificial Sequence: Synthetic oligonucleotide
uuacacaguaggauauucaaccuccau

SEQ ID NO: 441 - RNA, 27 nt, Artificial Sequence
  Description of Artificial Sequence: Synthetic oligonucleotide
uacacuacaagggaaaacucaaaaucu

SEQ ID NO: 442 - RNA, 27 nt, Artificial Sequence
  Description of Artificial Sequence: Synthetic oligonucleotide
caaucaacaaagaacaaacaggauaaa

SEQ ID NO: 443 - RNA, 27 nt, Artificial Sequence
  Description of Artificial Sequence: Synthetic oligonucleotide
uuucaaucaacaaagaacaaacaggau

SEQ ID NO: 444 - RNA, 27 nt, Artificial Sequence
  Description of Artificial Sequence: Synthetic oligonucleotide
auggaagaaaaagaaggcuguagagaa

SEQ ID NO: 445 - RNA, 27 nt, Artificial Sequence
  Description of Artificial Sequence: Synthetic oligonucleotide
uagaaggaagauuagcuauggaagaaa

SEQ ID NO: 446 - RNA, 27 nt, Artificial Sequence
  Description of Artificial Sequence: Synthetic oligonucleotide
augaagcauucaacaggaagauuauuu

SEQ ID NO: 447 - RNA, 27 nt, Artificial Sequence
  Description of Artificial Sequence: Synthetic oligonucleotide
caugaagcauucaacaggaagauuauu

SEQ ID NO: 448 - RNA, 27 nt, Artificial Sequence
  Description of Artificial Sequence: Synthetic oligonucleotide
ucaaaguagaauucaagucaugaagca

SEQ ID NO: 449 - RNA, 27 nt, Artificial Sequence
  Description of Artificial Sequence: Synthetic oligonucleotide
gucuguaguugcuucucucccucuuag

SEQ ID NO: 450 - RNA, 27 nt, Artificial Sequence
  Description of Artificial Sequence: Synthetic oligonucleotide
guugaccuuggucugguaggagacggc

SEQ ID NO: 451 - RNA, 27 nt, Artificial Sequence
  Description of Artificial Sequence: Synthetic oligonucleotide
gucgagauagucgggccgauugaucuc

SEQ ID NO: 452 - RNA, 27 nt, Artificial Sequence
  Description of Artificial Sequence: Synthetic oligonucleotide
guuugggaagguuggauguucguccuc

SEQ ID NO: 453 - RNA, 27 nt, Artificial Sequence
  Description of Artificial Sequence: Synthetic oligonucleotide
aguucuaagcuuggguuccgacccuaa

SEQ ID NO: 454 - RNA, 27 nt, Artificial Sequence
  Description of Artificial Sequence: Synthetic oligonucleotide
uuaaaguucuaagcuuggguuccgacc

SEQ ID NO: 455 - RNA, 27 nt, Artificial Sequence
  Description of Artificial Sequence: Synthetic oligonucleotide
guugcuuaaaguucuaagcuuggguuc

SEQ ID NO: 456 - RNA, 27 nt, Artificial Sequence
  Description of Artificial Sequence: Synthetic oligonucleotide
gugguggucuuguugcuuaaaguucua

SEQ ID NO: 457 - RNA, 27 nt, Artificial Sequence
  Description of Artificial Sequence: Synthetic oligonucleotide
acuuuauuucucgccacugaauaguag

SEQ ID NO: 458 - RNA, 27 nt, Artificial Sequence
  Description of Artificial Sequence: Synthetic oligonucleotide
aacuuuauuucucgccacugaauagua

SEQ ID NO: 459 - RNA, 27 nt, Artificial Sequence
  Description of Artificial Sequence: Synthetic oligonucleotide
ggaucauuuccuguuaucuguguuugu

SEQ ID NO: 460 - RNA, 27 nt, Artificial Sequence
  Description of Artificial Sequence: Synthetic oligonucleotide
guuucauuucuucucuuuucuuaaggc

SEQ ID NO: 461 - RNA, 27 nt, Artificial Sequence
  Description of Artificial Sequence: Synthetic oligonucleotide
ggaggauggaaacacacuccuucaguu

SEQ ID NO: 462 - RNA, 27 nt, Artificial Sequence
  Description of Artificial Sequence: Synthetic oligonucleotide
ucaaagauuuucagucccgcggugaca

SEQ ID NO: 463 - RNA, 27 nt, Artificial Sequence
  Description of Artificial Sequence: Synthetic oligonucleotide
ccugaacggcacgcuuauuucugcugu

SEQ ID NO: 464 - RNA, 27 nt, Artificial Sequence
  Description of Artificial Sequence: Synthetic oligonucleotide
cuucuggacccugaacggcacgcuuau

SEQ ID NO: 465 - RNA, 27 nt, Artificial Sequence
  Description of Artificial Sequence: Synthetic oligonucleotide
caagcagucuugagugacuguuucuuc

SEQ ID NO: 466 - RNA, 27 nt, Artificial Sequence
  Description of Artificial Sequence: Synthetic oligonucleotide
ccaaagacauggaccuucuuccucuga

SEQ ID NO: 467 - RNA, 27 nt, Artificial Sequence
  Description of Artificial Sequence: Synthetic oligonucleotide
guguuucaggcauauuuugaauacauc

SEQ ID NO: 468 - RNA, 27 nt, Artificial Sequence
  Description of Artificial Sequence: Synthetic oligonucleotide
gagguacagagaaagggaggaaaauag

SEQ ID NO: 469 - RNA, 27 nt, Artificial Sequence
  Description of Artificial Sequence: Synthetic oligonucleotide
ucuugucuugcucuaucuuucuuuggu

SEQ ID NO: 470 - RNA, 27 nt, Artificial Sequence
  Description of Artificial Sequence: Synthetic oligonucleotide
uuucuugucuugcucuaucuuucuuug

SEQ ID NO: 471 - RNA, 27 nt, Artificial Sequence
  Description of Artificial Sequence: Synthetic oligonucleotide
ggaucuuguacaaacaaaugcuuucuc

SEQ ID NO: 472 - RNA, 27 nt, Artificial Sequence
  Description of Artificial Sequence: Synthetic oligonucleotide
ucugcaaguacguucguuuaacucaag

SEQ ID NO: 473 - RNA, 27 nt, Artificial Sequence
  Description of Artificial Sequence: Synthetic oligonucleotide
ucuguaucgaucguucuguaucagucu

SEQ ID NO: 474 - RNA, 27 nt, Artificial Sequence
  Description of Artificial Sequence: Synthetic oligonucleotide
auuuauuuuuauauauauauaauauau

SEQ ID NO: 475 - RNA, 27 nt, Artificial Sequence
  Description of Artificial Sequence: Synthetic oligonucleotide
auauuuauuuuuauauauauauaauau

SEQ ID NO: 476 - RNA, 27 nt, Artificial Sequence
  Description of Artificial Sequence: Synthetic oligonucleotide
cacagcagucaaauacauccagugaag

SEQ ID NO: 477 - RNA, 27 nt, Artificial Sequence
  Description of Artificial Sequence: Synthetic oligonucleotide
gucucucaucuccuccucuucccuguc

SEQ ID NO: 478 - RNA, 27 nt, Artificial Sequence
  Description of Artificial Sequence: Synthetic oligonucleotide
ccaagugggacaaaaaaaagaucaugc

SEQ ID NO: 479 - RNA, 14 nt, Artificial Sequence
  Description of Artificial Sequence: Synthetic oligonucleotide
guauuuugaugagg

SEQ ID NO: 480 - RNA, 12 nt, Artificial Sequence
  Description of Artificial Sequence: Synthetic oligonucleotide
ggcccagaugau

SEQ ID NO: 481 - RNA, 14 nt, Artificial Sequence
  Description of Artificial Sequence: Synthetic oligonucleotide
gggaagaaaacuau

SEQ ID NO: 482 - RNA, 15 nt, Artificial Sequence
  Description of Artificial Sequence: Synthetic oligonucleotide
guuuuaauuuauuuc

SEQ ID NO: 483 - RNA, 12 nt, Artificial Sequence
  Description of Artificial Sequence: Synthetic oligonucleotide
acguagggaaau

SEQ ID NO: 484 - RNA, 12 nt, Artificial Sequence
  Description of Artificial Sequence: Synthetic oligonucleotide
ccaggguuuacc

SEQ ID NO: 485 - RNA, 11 nt, Artificial Sequence
  Description of Artificial Sequence: Synthetic oligonucleotide
agcaagguuua

SEQ ID NO: 486 - RNA, 12 nt, Artificial Sequence
  Description of Artificial Sequence: Synthetic oligonucleotide
uguauuauguug

SEQ ID NO: 487 - RNA, 15 nt, Artificial Sequence
  Description of Artificial Sequence: Synthetic oligonucleotide
uuuuaaucuuuguga

SEQ ID NO: 488 - RNA, 14 nt, Artificial Sequence
  Description of Artificial Sequence: Synthetic oligonucleotide
uuaaucuuugugac

SEQ ID NO: 489 - RNA, 13 nt, Artificial Sequence
  Description of Artificial Sequence: Synthetic oligonucleotide
gcugcuuaugucu

SEQ ID NO: 490 - RNA, 14 nt, Artificial Sequence
  Description of Artificial Sequence: Synthetic oligonucleotide
aaguguuucagaag

SEQ ID NO: 491 - RNA, 13 nt, Artificial Sequence
  Description of Artificial Sequence: Synthetic oligonucleotide
gaccaucaauaag

SEQ ID NO: 492 - RNA, 13 nt, Artificial Sequence
  Description of Artificial Sequence: Synthetic oligonucleotide
ccaucaauaagga

SEQ ID NO: 493 - RNA, 14 nt, Artificial Sequence
  Description of Artificial Sequence: Synthetic oligonucleotide
ucaauaaggaagaa

SEQ ID NO: 494 - RNA, 14 nt, Artificial Sequence
  Description of Artificial Sequence: Synthetic oligonucleotide
aauaaggaagaagc

SEQ ID NO: 495 - RNA, 13 nt, Artificial Sequence
  Description of Artificial Sequence: Synthetic oligonucleotide
aggaagaagcccu

SEQ ID NO: 496 - RNA, 13 nt, Artificial Sequence
  Description of Artificial Sequence: Synthetic oligonucleotide
gcauaacuaaagg

SEQ ID NO: 497 - RNA, 14 nt, Artificial Sequence
  Description of Artificial Sequence: Synthetic oligonucleotide
cauaacuaaaggug

SEQ ID NO: 498 - RNA, 12 nt, Artificial Sequence
  Description of Artificial Sequence: Synthetic oligonucleotide
cuacaucacgcc

SEQ ID NO: 499 - RNA, 12 nt, Artificial Sequence
  Description of Artificial Sequence: Synthetic oligonucleotide
acuggauuuaag

SEQ ID NO: 500 - RNA, 12 nt, Artificial Sequence
  Description of Artificial Sequence: Synthetic oligonucleotide
cuggauuuaagc

SEQ ID NO: 501 - RNA, 13 nt, Artificial Sequence
  Description of Artificial Sequence: Synthetic oligonucleotide
gauuuaagcagag

SEQ ID NO: 502 - RNA, 13 nt, Artificial Sequence
  Description of Artificial Sequence: Synthetic oligonucleotide
auuuaagcagagu

SEQ ID NO: 503 - RNA, 13 nt, Artificial Sequence
  Description of Artificial Sequence: Synthetic oligonucleotide
uuaagcagaguuc

SEQ ID NO: 504 - RNA, 13 nt, Artificial Sequence
  Description of Artificial Sequence: Synthetic oligonucleotide
uaagcagaguuca

SEQ ID NO: 505 - RNA, 14 nt, Artificial Sequence
  Description of Artificial Sequence: Synthetic oligonucleotide
agcagaguucaaaa

SEQ ID NO: 506 - RNA, 12 nt, Artificial Sequence
  Description of Artificial Sequence: Synthetic oligonucleotide
cucagggucuga

SEQ ID NO: 507 - RNA, 13 nt, Artificial Sequence
  Description of Artificial Sequence: Synthetic oligonucleotide
caagcaacuacau

SEQ ID NO: 508 - RNA, 12 nt, Artificial Sequence
  Description of Artificial Sequence: Synthetic oligonucleotide
aucaauggcagc

SEQ ID NO: 509 - RNA, 11 nt, Artificial Sequence
  Description of Artificial Sequence: Synthetic oligonucleotide
uuccagcccac

SEQ ID NO: 510 - RNA, 12 nt, Artificial Sequence
  Description of Artificial Sequence: Synthetic oligonucleotide
cagcugagaaug

SEQ ID NO: 511 - RNA, 13 nt, Artificial Sequence
  Description of Artificial Sequence: Synthetic oligonucleotide
aacguaucuccua

SEQ ID NO: 512 - RNA, 14 nt, Artificial Sequence
  Description of Artificial Sequence: Synthetic oligonucleotide
ccuaaaauaauuuc

SEQ ID NO: 513 - RNA, 13 nt, Artificial Sequence
  Description of Artificial Sequence: Synthetic oligonucleotide
uggaagauucagc

SEQ ID NO: 514 - RNA, 12 nt, Artificial Sequence
  Description of Artificial Sequence: Synthetic oligonucleotide
uuaaacucuccu

SEQ ID NO: 515 - RNA, 12 nt, Artificial Sequence
  Description of Artificial Sequence: Synthetic oligonucleotide
cagccuacaguu

SEQ ID NO: 516 - RNA, 13 nt, Artificial Sequence
  Description of Artificial Sequence: Synthetic oligonucleotide
guuauguucaguc

SEQ ID NO: 517 - RNA, 13 nt, Artificial Sequence
  Description of Artificial Sequence: Synthetic oligonucleotide
cacauacaaaaug

SEQ ID NO: 518 - RNA, 9 nt, Artificial Sequence
  Description of Artificial Sequence: Synthetic oligonucleotide
uccuuuugc

SEQ ID NO: 519 - RNA, 12 nt, Artificial Sequence
  Description of Artificial Sequence: Synthetic oligonucleotide
ugaccugugaag

SEQ ID NO: 520 - RNA, 12 nt, Artificial Sequence
  Description of Artificial Sequence: Synthetic oligonucleotide
cuaucucacaca

SEQ ID NO: 521 - RNA, 13 nt, Artificial Sequence
  Description of Artificial Sequence: Synthetic oligonucleotide
uguccucaauugu

SEQ ID NO: 522 - RNA, 12 nt, Artificial Sequence
  Description of Artificial Sequence: Synthetic oligonucleotide
aaaccguagcug

SEQ ID NO: 523 - RNA, 12 nt, Artificial Sequence
  Description of Artificial Sequence: Synthetic oligonucleotide
uagcuggcaagc

SEQ ID NO: 524 - RNA, 14 nt, Artificial Sequence
  Description of Artificial Sequence: Synthetic oligonucleotide
uuguaugguuaaaa

SEQ ID NO: 525 - RNA, 14 nt, Artificial Sequence
  Description of Artificial Sequence: Synthetic oligonucleotide
ugguuaaaagaugg

SEQ ID NO: 526 - RNA, 13 nt, Artificial Sequence
  Description of Artificial Sequence: Synthetic oligonucleotide
cagggaauuauac

SEQ ID NO: 527 - RNA, 12 nt, Artificial Sequence
  Description of Artificial Sequence: Synthetic oligonucleotide
acaaucuugcug

SEQ ID NO: 528 - RNA, 13 nt, Artificial Sequence
  Description of Artificial Sequence: Synthetic oligonucleotide
ccaauaaugaaga

SEQ ID NO: 529 - RNA, 13 nt, Artificial Sequence
  Description of Artificial Sequence: Synthetic oligonucleotide
acuuuggauguuc

SEQ ID NO: 530 - RNA, 12 nt, Artificial Sequence
  Description of Artificial Sequence: Synthetic oligonucleotide
aaugcuuccacu

SEQ ID NO: 531 - RNA, 11 nt, Artificial Sequence
  Description of Artificial Sequence: Synthetic oligonucleotide
gagaaaguuug

SEQ ID NO: 532 - RNA, 11 nt, Artificial Sequence
  Description of Artificial Sequence: Synthetic oligonucleotide
aaagaacuacu

SEQ ID NO: 533 - RNA, 12 nt, Artificial Sequence
  Description of Artificial Sequence: Synthetic oligonucleotide
uuagaaauacgg

SEQ ID NO: 534 - RNA, 12 nt, Artificial Sequence
  Description of Artificial Sequence: Synthetic oligonucleotide
aacauggguaca

SEQ ID NO: 535 - RNA, 14 nt, Artificial Sequence
  Description of Artificial Sequence: Synthetic oligonucleotide
aaagacacagaaga

SEQ ID NO: 536 - RNA, 11 nt, Artificial Sequence
  Description of Artificial Sequence: Synthetic oligonucleotide
uaguagggagg

SEQ ID NO: 537 - RNA, 12 nt, Artificial Sequence
  Description of Artificial Sequence: Synthetic oligonucleotide
gccuucugcagc

SEQ ID NO: 538 - RNA, 10 nt, Artificial Sequence
  Description of Artificial Sequence: Synthetic oligonucleotide
ggucugguac

SEQ ID NO: 539 - RNA, 12 nt, Artificial Sequence
  Description of Artificial Sequence: Synthetic oligonucleotide
cuaguccuuccg

SEQ ID NO: 540 - RNA, 12 nt, Artificial Sequence
  Description of Artificial Sequence: Synthetic oligonucleotide
ccagugaauauu

SEQ ID NO: 541 - RNA, 13 nt, Artificial Sequence
  Description of Artificial Sequence: Synthetic oligonucleotide
augaauucaaguu

SEQ ID NO: 542 - RNA, 12 nt, Artificial Sequence
  Description of Artificial Sequence: Synthetic oligonucleotide
caggacacagau

SEQ ID NO: 543 - RNA, 12 nt, Artificial Sequence
  Description of Artificial Sequence: Synthetic oligonucleotide
cucaaagcacag

SEQ ID NO: 544 - RNA, 10 nt, Artificial Sequence
  Description of Artificial Sequence: Synthetic oligonucleotide
accacugcca

SEQ ID NO: 545 - RNA, 13 nt, Artificial Sequence
  Description of Artificial Sequence: Synthetic oligonucleotide
gaaacuacuagug

SEQ ID NO: 546 - RNA, 12 nt, Artificial Sequence
  Description of Artificial Sequence: Synthetic oligonucleotide
aagucggacagc

SEQ ID NO: 547 - RNA, 13 nt, Artificial Sequence
  Description of Artificial Sequence: Synthetic oligonucleotide
gaaagcgaaaaau

SEQ ID NO: 548 - RNA, 13 nt, Artificial Sequence
  Description of Artificial Sequence: Synthetic oligonucleotide
cccucugauuuag

SEQ ID NO: 549 - RNA, 12 nt, Artificial Sequence
  Description of Artificial Sequence: Synthetic oligonucleotide
ugagcuauuuaa

SEQ ID NO: 550 - RNA, 13 nt, Artificial Sequence
  Description of Artificial Sequence: Synthetic oligonucleotide
aaaaggugaaaaa

SEQ ID NO: 551 - RNA, 14 nt, Artificial Sequence
  Description of Artificial Sequence: Synthetic oligonucleotide
gaaaaagcacuauu

SEQ ID NO: 552 - RNA, 12 nt, Artificial Sequence
  Description of Artificial Sequence: Synthetic oligonucleotide
ggcugaaaagaa

SEQ ID NO: 553 - RNA, 12 nt, Artificial Sequence
  Description of Artificial Sequence: Synthetic oligonucleotide
uaaacccuuaua

SEQ ID NO: 554 - RNA, 13 nt, Artificial Sequence
  Description of Artificial Sequence: Synthetic oligonucleotide
cauacuauuagcc

SEQ ID NO: 555 - RNA, 12 nt, Artificial Sequence
  Description of Artificial Sequence: Synthetic oligonucleotide
gacagaagcauu

SEQ ID NO: 556 - RNA, 14 nt, Artificial Sequence
  Description of Artificial Sequence: Synthetic oligonucleotide
agagcaaauaagau

SEQ ID NO: 557 - RNA, 14 nt, Artificial Sequence
  Description of Artificial Sequence: Synthetic oligonucleotide
ccaacauuuuucuc

SEQ ID NO: 558 - RNA, 15 nt, Artificial Sequence
  Description of Artificial Sequence: Synthetic oligonucleotide
uuaaguaugagaaaa

SEQ ID NO: 559 - RNA, 14 nt, Artificial Sequence
  Description of Artificial Sequence: Synthetic oligonucleotide
caggaauaaagaug

SEQ ID NO: 560 - RNA, 13 nt, Artificial Sequence
  Description of Artificial Sequence: Synthetic oligonucleotide
aauuugaaugacc

SEQ ID NO: 561 - RNA, 14 nt, Artificial Sequence
  Description of Artificial Sequence: Synthetic oligonucleotide
auguauaaagauag

SEQ ID NO: 562 - RNA, 12 nt, Artificial Sequence
  Description of Artificial Sequence: Synthetic oligonucleotide
ggcuguaacuau

SEQ ID NO: 563 - RNA, 11 nt, Artificial Sequence
  Description of Artificial Sequence: Synthetic oligonucleotide
ucugugaagug

SEQ ID NO: 564 - RNA, 14 nt, Artificial Sequence
  Description of Artificial Sequence: Synthetic oligonucleotide
ccuuuaaggaaaug

SEQ ID NO: 565 - RNA, 13 nt, Artificial Sequence
  Description of Artificial Sequence: Synthetic oligonucleotide
aaggauacaaaaa

SEQ ID NO: 566 - RNA, 12 nt, Artificial Sequence
  Description of Artificial Sequence: Synthetic oligonucleotide
agaugcaauuug

SEQ ID NO: 567 - RNA, 12 nt, Artificial Sequence
  Description of Artificial Sequence: Synthetic oligonucleotide
guucaaaacgaa

SEQ ID NO: 568 - RNA, 11 nt, Artificial Sequence
  Description of Artificial Sequence: Synthetic oligonucleotide
gugaaaccuca

SEQ ID NO: 569 - RNA, 13 nt, Artificial Sequence
  Description of Artificial Sequence: Synthetic oligonucleotide
acgaaagagaagc

SEQ ID NO: 570 - RNA, 12 nt, Artificial Sequence
  Description of Artificial Sequence: Synthetic oligonucleotide
cuccacaagcgc

SEQ ID NO: 571 - RNA, 14 nt, Artificial Sequence
  Description of Artificial Sequence: Synthetic oligonucleotide
gagaagauuccaaa

SEQ ID NO: 572 - RNA, 13 nt, Artificial Sequence
  Description of Artificial Sequence: Synthetic oligonucleotide
aaucuggauucaa

SEQ ID NO: 573 - RNA, 13 nt, Artificial Sequence
  Description of Artificial Sequence: Synthetic oligonucleotide
agaacagauuuga

SEQ ID NO: 574 - RNA, 11 nt, Artificial Sequence
  Description of Artificial Sequence: Synthetic oligonucleotide
ccagagcugug

SEQ ID NO: 575 - RNA, 12 nt, Artificial Sequence
  Description of Artificial Sequence: Synthetic oligonucleotide
ccucagauuguu

SEQ ID NO: 576 - RNA, 12 nt, Artificial Sequence
  Description of Artificial Sequence: Synthetic oligonucleotide
cuauuuuaauua

SEQ ID NO: 577 - RNA, 13 nt, Artificial Sequence
  Description of Artificial Sequence: Synthetic oligonucleotide
uuuaauuuauuaa

SEQ ID NO: 578 - RNA, 12 nt, Artificial Sequence
  Description of Artificial Sequence: Synthetic oligonucleotide
augcaguuugaa

SEQ ID NO: 579 - RNA, 11 nt, Artificial Sequence
  Description of Artificial Sequence: Synthetic oligonucleotide
caugcugcugg

SEQ ID NO: 580 - RNA, 13 nt, Artificial Sequence
  Description of Artificial Sequence: Synthetic oligonucleotide
agaugugcauuuc

SEQ ID NO: 581 - RNA, 12 nt, Artificial Sequence
  Description of Artificial Sequence: Synthetic oligonucleotide
ucaaaaccugug

SEQ ID NO: 582 - RNA, 11 nt, Artificial Sequence
  Description of Artificial Sequence: Synthetic oligonucleotide
gaaugugggua

SEQ ID NO: 583 - RNA, 10 nt, Artificial Sequence
  Description of Artificial Sequence: Synthetic oligonucleotide
auguggguag

SEQ ID NO: 584 - RNA, 13 nt, Artificial Sequence
  Description of Artificial Sequence: Synthetic oligonucleotide
ugaaaaugagcau

SEQ ID NO: 585 - RNA, 13 nt, Artificial Sequence
  Description of Artificial Sequence: Synthetic oligonucleotide
uugcuuuucaugu

SEQ ID NO: 586 - RNA, 12 nt, Artificial Sequence
  Description of Artificial Sequence: Synthetic oligonucleotide
uguauuucuaua

SEQ ID NO: 587 - RNA, 13 nt, Artificial Sequence
  Description of Artificial Sequence: Synthetic oligonucleotide
uuugauuaauguu

SEQ ID NO: 588 - RNA, 12 nt, Artificial Sequence
  Description of Artificial Sequence: Synthetic oligonucleotide
caacguguauag

SEQ ID NO: 589 - RNA, 12 nt, Artificial Sequence
  Description of Artificial Sequence: Synthetic oligonucleotide
cauauccuuggc

SEQ ID NO: 590 - RNA, 13 nt, Artificial Sequence
  Description of Artificial Sequence: Synthetic oligonucleotide
uacuaacaucugg

SEQ ID NO: 591 - RNA, 11 nt, Artificial Sequence
  Description of Artificial Sequence: Synthetic oligonucleotide
cauaaguugug

SEQ ID NO: 592 - RNA, 12 nt, Artificial Sequence
  Description of Artificial Sequence: Synthetic oligonucleotide
gcaucauuuugg

SEQ ID NO: 593 - RNA, 10 nt, Artificial Sequence
  Description of Artificial Sequence: Synthetic oligonucleotide
gcucuucuua

SEQ ID NO: 594 - RNA, 10 nt, Artificial Sequence
  Description of Artificial Sequence: Synthetic oligonucleotide
agauuagguc

SEQ ID NO: 595 - RNA, 12 nt, Artificial Sequence
  Description of Artificial Sequence: Synthetic oligonucleotide
auggaauugaaa

SEQ ID NO: 596 - RNA, 13 nt, Artificial Sequence
  Description of Artificial Sequence: Synthetic oligonucleotide
cacacucauuccu

SEQ ID NO: 597 - RNA, 12 nt, Artificial Sequence
  Description of Artificial Sequence: Synthetic oligonucleotide
uguagagguaac

SEQ ID NO: 598 - RNA, 11 nt, Artificial Sequence
  Description of Artificial Sequence: Synthetic oligonucleotide
caaccacaugc

SEQ ID NO: 599 - RNA, 12 nt, Artificial Sequence
  Description of Artificial Sequence: Synthetic oligonucleotide
ucggaaacaagu

SEQ ID NO: 600 - RNA, 11 nt, Artificial Sequence
  Description of Artificial Sequence: Synthetic oligonucleotide
acucccaauaa

SEQ ID NO: 601 - RNA, 13 nt, Artificial Sequence
  Description of Artificial Sequence: Synthetic oligonucleotide
aaugcuaagaaau

SEQ ID NO: 602 - RNA, 11 nt, Artificial Sequence
  Description of Artificial Sequence: Synthetic oligonucleotide
gucuuucucua

SEQ ID NO: 603 - RNA, 11 nt, Artificial Sequence
  Description of Artificial Sequence: Synthetic oligonucleotide
ugaauuucagg

SEQ ID NO: 604 - RNA, 13 nt, Artificial Sequence
  Description of Artificial Sequence: Synthetic oligonucleotide
cgauucccucuca

SEQ ID NO: 605 - RNA, 11 nt, Artificial Sequence
  Description of Artificial Sequence: Synthetic oligonucleotide
aggaaagugaa

SEQ ID NO: 606 - RNA, 12 nt, Artificial Sequence
  Description of Artificial Sequence: Synthetic oligonucleotide
gaggcugcaugc

SEQ ID NO: 607 - RNA, 11 nt, Artificial Sequence
  Description of Artificial Sequence: Synthetic oligonucleotide
ucucugaacag

SEQ ID NO: 608 - RNA, 12 nt, Artificial Sequence
  Description of Artificial Sequence: Synthetic oligonucleotide
aacuuggcugua

SEQ ID NO: 609 - RNA, 12 nt, Artificial Sequence
  Description of Artificial Sequence: Synthetic oligonucleotide
agaagccaaaau

SEQ ID NO: 610 - RNA, 14 nt, Artificial Sequence
  Description of Artificial Sequence: Synthetic oligonucleotide
auuaaaagaagucc

SEQ ID NO: 611 - RNA, 14 nt, Artificial Sequence
  Description of Artificial Sequence: Synthetic oligonucleotide
gaauccggauuauc

SEQ ID NO: 612 - RNA, 12 nt, Artificial Sequence
  Description of Artificial Sequence: Synthetic oligonucleotide
aaugugacauca

SEQ ID NO: 613 - RNA, 13 nt, Artificial Sequence
  Description of Artificial Sequence: Synthetic oligonucleotide
caucaaagcaagu

SEQ ID NO: 614 - RNA, 11 nt, Artificial Sequence
  Description of Artificial Sequence: Synthetic oligonucleotide
agagagagaaa

SEQ ID NO: 615 - RNA, 13 nt, Artificial Sequence
  Description of Artificial Sequence: Synthetic oligonucleotide
ucgcuguaguauu

SEQ ID NO: 616 - RNA, 14 nt, Artificial Sequence
  Description of Artificial Sequence: Synthetic oligonucleotide
cgcuguaguauuua

SEQ ID NO: 617 - RNA, 13 nt, Artificial Sequence
  Description of Artificial Sequence: Synthetic oligonucleotide
auuuaagcccaua

SEQ ID NO: 618 - RNA, 15 nt, Artificial Sequence
  Description of Artificial Sequence: Synthetic oligonucleotide
auuaaaauaaacaug

SEQ ID NO: 619 - RNA, 12 nt, Artificial Sequence
  Description of Artificial Sequence: Synthetic oligonucleotide
cuguucugaucg

SEQ ID NO: 620 - RNA, 16 nt, Artificial Sequence
  Description of Artificial Sequence: Synthetic oligonucleotide
aaauaauuugaacuuu

SEQ ID NO: 621 - RNA, 12 nt, Artificial Sequence
  Description of Artificial Sequence: Synthetic oligonucleotide
ugcgaccuuaau

SEQ ID NO: 622 - RNA, 11 nt, Artificial Sequence
  Description of Artificial Sequence: Synthetic oligonucleotide
cugagaaagcu

SEQ ID NO: 623 - RNA, 13 nt, Artificial Sequence
  Description of Artificial Sequence: Synthetic oligonucleotide
aguaaagaugcua

SEQ ID NO: 624 - RNA, 12 nt, Artificial Sequence
  Description of Artificial Sequence: Synthetic oligonucleotide
cugcuuaauugc

SEQ ID NO: 625 - RNA, 14 nt, Artificial Sequence
  Description of Artificial Sequence: Synthetic oligonucleotide
uaccauaugaauga

SEQ ID NO: 626 - RNA, 12 nt, Artificial Sequence
  Description of Artificial Sequence: Synthetic oligonucleotide
aacuuucuuauc

SEQ ID NO: 627 - RNA, 13 nt, Artificial Sequence
  Description of Artificial Sequence: Synthetic oligonucleotide
ccuugcaugacau

SEQ ID NO: 628 - RNA, 14 nt, Artificial Sequence
  Description of Artificial Sequence: Synthetic oligonucleotide
ugaauuuguauaug

SEQ ID NO: 629 - RNA, 12 nt, Artificial Sequence
  Description of Artificial Sequence: Synthetic oligonucleotide
gaauccuaguag

SEQ ID NO: 630 - RNA, 10 nt, Artificial Sequence
  Description of Artificial Sequence: Synthetic oligonucleotide
gaaagggaag

SEQ ID NO: 631 - RNA, 11 nt, Artificial Sequence
  Description of Artificial Sequence: Synthetic oligonucleotide
uaucggcaugc

SEQ ID NO: 632 - RNA, 12 nt, Artificial Sequence
  Description of Artificial Sequence: Synthetic oligonucleotide
caccucauagua

SEQ ID NO: 633 - RNA, 11 nt, Artificial Sequence
  Description of Artificial Sequence: Synthetic oligonucleotide
ccagaauugcc

SEQ ID NO: 634 - RNA, 11 nt, Artificial Sequence
  Description of Artificial Sequence: Synthetic oligonucleotide
uggugaucugg

SEQ ID NO: 635 - RNA, 12 nt, Artificial Sequence
  Description of Artificial Sequence: Synthetic oligonucleotide
gaucuggguaau

SEQ ID NO: 636 - RNA, 12 nt, Artificial Sequence
  Description of Artificial Sequence: Synthetic oligonucleotide
ggaugugaugaa

SEQ ID NO: 637 - RNA, 12 nt, Artificial Sequence
  Description of Artificial Sequence: Synthetic oligonucleotide
cauuuccacagc

SEQ ID NO: 638 - RNA, 11 nt, Artificial Sequence
  Description of Artificial Sequence: Synthetic oligonucleotide
acagcuacacc

SEQ ID NO: 639 - RNA, 12 nt, Artificial Sequence
  Description of Artificial Sequence: Synthetic oligonucleotide
ugcaguucuuac

SEQ ID NO: 640 - RNA, 12 nt, Artificial Sequence
  Description of Artificial Sequence: Synthetic oligonucleotide
acgagaagaaga

SEQ ID NO: 641 - RNA, 12 nt, Artificial Sequence
  Description of Artificial Sequence: Synthetic oligonucleotide
cgagaagaagau

SEQ ID NO: 642 - RNA, 15 nt, Artificial Sequence
  Description of Artificial Sequence: Synthetic oligonucleotide
aagaagaucauuuac

SEQ ID NO: 643 - RNA, 11 nt, Artificial Sequence
  Description of Artificial Sequence: Synthetic oligonucleotide
agaggaagagg

SEQ ID NO: 644 - RNA, 12 nt, Artificial Sequence
  Description of Artificial Sequence: Synthetic oligonucleotide
gaggaagaggug

SEQ ID NO: 645 - RNA, 13 nt, Artificial Sequence
  Description of Artificial Sequence: Synthetic oligonucleotide
cuacuuugagggc

SEQ ID NO: 646 - RNA, 12 nt, Artificial Sequence
  Description of Artificial Sequence: Synthetic oligonucleotide
agggcaucuccu

SEQ ID NO: 647 - RNA, 10 nt, Artificial Sequence
  Description of Artificial Sequence: Synthetic oligonucleotide
ggagugauau

SEQ ID NO: 648 - RNA, 11 nt, Artificial Sequence
  Description of Artificial Sequence: Synthetic oligonucleotide
gagugauaugg

SEQ ID NO: 649 - RNA, 12 nt, Artificial Sequence
  Description of Artificial Sequence: Synthetic oligonucleotide
ugcaguaaagau

SEQ ID NO: 650 - RNA, 13 nt, Artificial Sequence
  Description of Artificial Sequence: Synthetic oligonucleotide
aguaaagauccua

SEQ ID NO: 651 - RNA, 12 nt, Artificial Sequence
  Description of Artificial Sequence: Synthetic oligonucleotide
ugacaaaggaca

SEQ ID NO: 652 - RNA, 13 nt, Artificial Sequence
  Description of Artificial Sequence: Synthetic oligonucleotide
gcaauugugaccc

SEQ ID NO: 653 - RNA, 12 nt, Artificial Sequence
  Description of Artificial Sequence: Synthetic oligonucleotide
aacaucauccau

SEQ ID NO: 654 - RNA, 12 nt, Artificial Sequence
  Description of Artificial Sequence: Synthetic oligonucleotide
ugaaauccaaca

SEQ ID NO: 655 - RNA, 15 nt, Artificial Sequence
  Description of Artificial Sequence: Synthetic oligonucleotide
aacaauauauuucuc

SEQ ID NO: 656 - RNA, 14 nt, Artificial Sequence
  Description of Artificial Sequence: Synthetic oligonucleotide
aacaguaaagucac

SEQ ID NO: 657 - RNA, 14 nt, Artificial Sequence
  Description of Artificial Sequence: Synthetic oligonucleotide
ugugaagaaaguaa

SEQ ID NO: 658 - RNA, 13 nt, Artificial Sequence
  Description of Artificial Sequence: Synthetic oligonucleotide
cuuccgagccauc

SEQ ID NO: 659 - RNA, 12 nt, Artificial Sequence
  Description of Artificial Sequence: Synthetic oligonucleotide
aauggagguuga

SEQ ID NO: 660 - RNA, 12 nt, Artificial Sequence
  Description of Artificial Sequence: Synthetic oligonucleotide
ggagguugaaua

SEQ ID NO: 661 - RNA, 13 nt, Artificial Sequence
  Description of Artificial Sequence: Synthetic oligonucleotide
auuuugaguuuuc

SEQ ID NO: 662 - RNA, 12 nt, Artificial Sequence
  Description of Artificial Sequence: Synthetic oligonucleotide
uauccuguuugu

SEQ ID NO: 663 - RNA, 11 nt, Artificial Sequence
  Description of Artificial Sequence: Synthetic oligonucleotide
ccuguuuguuc

SEQ ID NO: 664 - RNA, 10 nt, Artificial Sequence
  Description of Artificial Sequence: Synthetic oligonucleotide
cucuacagcc

SEQ ID NO: 665 - RNA, 12 nt, Artificial Sequence
  Description of Artificial Sequence: Synthetic oligonucleotide
ucuuccauagcu

SEQ ID NO: 666 - RNA, 12 nt, Artificial Sequence
  Description of Artificial Sequence: Synthetic oligonucleotide
auaaucuuccug

SEQ ID NO: 667 - RNA, 12 nt, Artificial Sequence
  Description of Artificial Sequence: Synthetic oligonucleotide
uaaucuuccugu

SEQ ID NO: 668 - RNA, 12 nt, Artificial Sequence
  Description of Artificial Sequence: Synthetic oligonucleotide
cuucaugacuug

SEQ ID NO: 669 - RNA, 12 nt, Artificial Sequence
  Description of Artificial Sequence: Synthetic oligonucleotide
aagagggagaga

SEQ ID NO: 670 - RNA, 12 nt, Artificial Sequence
  Description of Artificial Sequence: Synthetic oligonucleotide
cgucuccuacca

SEQ ID NO: 671 - RNA, 12 nt, Artificial Sequence
  Description of Artificial Sequence: Synthetic oligonucleotide
gaucaaucggcc

SEQ ID NO: 672 - RNA, 12 nt, Artificial Sequence
  Description of Artificial Sequence: Synthetic oligonucleotide
ggacgaacaucc

SEQ ID NO: 673 - RNA, 11 nt, Artificial Sequence
  Description of Artificial Sequence: Synthetic oligonucleotide
agggucggaac

SEQ ID NO: 674 - RNA, 10 nt, Artificial Sequence
  Description of Artificial Sequence: Synthetic oligonucleotide
ucggaaccca

SEQ ID NO: 675 - RNA, 11 nt, Artificial Sequence
  Description of Artificial Sequence: Synthetic oligonucleotide
acccaagcuua

SEQ ID NO: 676 - RNA, 14 nt, Artificial Sequence
  Description of Artificial Sequence: Synthetic oligonucleotide
gaacuuuaagcaac

SEQ ID NO: 677 - RNA, 11 nt, Artificial Sequence
  Description of Artificial Sequence: Synthetic oligonucleotide
acuauucagug

SEQ ID NO: 678 - RNA, 11 nt, Artificial Sequence
  Description of Artificial Sequence: Synthetic oligonucleotide
cuauucagugg

SEQ ID NO: 679 - RNA, 13 nt, Artificial Sequence
  Description of Artificial Sequence: Synthetic oligonucleotide
aaacacagauaac

SEQ ID NO: 680 - RNA, 12 nt, Artificial Sequence
  Description of Artificial Sequence: Synthetic oligonucleotide
cuuaagaaaaga

SEQ ID NO: 681 - RNA, 12 nt, Artificial Sequence
  Description of Artificial Sequence: Synthetic oligonucleotide
cugaaggagugu

SEQ ID NO: 682 - RNA, 10 nt, Artificial Sequence
  Description of Artificial Sequence: Synthetic oligonucleotide
ucaccgcggg

SEQ ID NO: 683 - RNA, 14 nt, Artificial Sequence
  Description of Artificial Sequence: Synthetic oligonucleotide
agcagaaauaagcg

SEQ ID NO: 684 - RNA, 12 nt, Artificial Sequence
  Description of Artificial Sequence: Synthetic oligonucleotide
aagcgugccguu

SEQ ID NO: 685 - RNA, 12 nt, Artificial Sequence
  Description of Artificial Sequence: Synthetic oligonucleotide
agaaacagucac

SEQ ID NO: 686 - RNA, 12 nt, Artificial Sequence
  Description of Artificial Sequence: Synthetic oligonucleotide
agaggaagaagg

SEQ ID NO: 687 - RNA, 14 nt, Artificial Sequence
  Description of Artificial Sequence: Synthetic oligonucleotide
uguauucaaaauau

SEQ ID NO: 688 - RNA, 13 nt, Artificial Sequence
  Description of Artificial Sequence: Synthetic oligonucleotide
auuuuccucccuu

SEQ ID NO: 689 - RNA, 13 nt, Artificial Sequence
  Description of Artificial Sequence: Synthetic oligonucleotide
caaagaaagauag

SEQ ID NO: 690 - RNA, 12 nt, Artificial Sequence
  Description of Artificial Sequence: Synthetic oligonucleotide
aagaaagauaga

SEQ ID NO: 691 - RNA, 13 nt, Artificial Sequence
  Description of Artificial Sequence: Synthetic oligonucleotide
gaaagcauuuguu

SEQ ID NO: 692 - RNA, 13 nt, Artificial Sequence
  Description of Artificial Sequence: Synthetic oligonucleotide
ugaguuaaacgaa

SEQ ID NO: 693 - RNA, 12 nt, Artificial Sequence
  Description of Artificial Sequence: Synthetic oligonucleotide
acugauacagaa

SEQ ID NO: 694 - RNA, 12 nt, Artificial Sequence
  Description of Artificial Sequence: Synthetic oligonucleotide
auauuauauaua

SEQ ID NO: 695 - RNA, 12 nt, Artificial Sequence
  Description of Artificial Sequence: Synthetic oligonucleotide
auuauauauaua

SEQ ID NO: 696 - RNA, 12 nt, Artificial Sequence
  Description of Artificial Sequence: Synthetic oligonucleotide
ucacuggaugua

SEQ ID NO: 697 - RNA, 12 nt, Artificial Sequence
  Description of Artificial Sequence: Synthetic oligonucleotide
cagggaagagga

SEQ ID NO: 698 - RNA, 15 nt, Artificial Sequence
  Description of Artificial Sequence: Synthetic oligonucleotide
augaucuuuuuuuug

SEQ ID NO: 699 - RNA, 11 nt, Artificial Sequence
  Description of Artificial Sequence: Synthetic oligonucleotide
aguucacggcc

SEQ ID NO: 700 - RNA, 13 nt, Artificial Sequence
  Description of Artificial Sequence: Synthetic oligonucleotide
caccaucacacca

SEQ ID NO: 701 - RNA, 11 nt, Artificial Sequence
  Description of Artificial Sequence: Synthetic oligonucleotide
ccugcggguuu

SEQ ID NO: 702 - RNA, 10 nt, Artificial Sequence
  Description of Artificial Sequence: Synthetic oligonucleotide
auccaguuug

SEQ ID NO: 703 - RNA, 13 nt, Artificial Sequence
  Description of Artificial Sequence: Synthetic oligonucleotide
guuaaggacuucu

SEQ ID NO: 704 - RNA, 13 nt, Artificial Sequence
  Description of Artificial Sequence: Synthetic oligonucleotide
cagugggacagag

SEQ ID NO: 705 - RNA, 14 nt, Artificial Sequence
  Description of Artificial Sequence: Synthetic oligonucleotide
aauuuguuauugug

SEQ ID NO: 706 - RNA, 13 nt, Artificial Sequence
  Description of Artificial Sequence: Synthetic oligonucleotide
uucaaaugcauuu

SEQ ID NO: 707 - RNA, 10 nt, Artificial Sequence
  Description of Artificial Sequence: Synthetic oligonucleotide
caggaaagcc

SEQ ID NO: 708 - RNA, 11 nt, Artificial Sequence
  Description of Artificial Sequence: Synthetic oligonucleotide
aggaaagcccu

SEQ ID NO: 709 - RNA, 12 nt, Artificial Sequence
  Description of Artificial Sequence: Synthetic oligonucleotide
cccagcauggcc

SEQ ID NO: 710 - RNA, 11 nt, Artificial Sequence
  Description of Artificial Sequence: Synthetic oligonucleotide
cuucucccuga

SEQ ID NO: 711 - RNA, 12 nt, Artificial Sequence
  Description of Artificial Sequence: Synthetic oligonucleotide
gaagaagcccuu

SEQ ID NO: 712 - RNA, 12 nt, Artificial Sequence
  Description of Artificial Sequence: Synthetic oligonucleotide
agaagcccuuca

SEQ ID NO: 713 - RNA, 11 nt, Artificial Sequence
  Description of Artificial Sequence: Synthetic oligonucleotide
gcccuucagcg

SEQ ID NO: 714 - RNA, 11 nt, Artificial Sequence
  Description of Artificial Sequence: Synthetic oligonucleotide
ccuucagcggc

SEQ ID NO: 715 - RNA, 12 nt, Artificial Sequence
  Description of Artificial Sequence: Synthetic oligonucleotide
ucagcggccagu

SEQ ID NO: 716 - RNA, 12 nt, Artificial Sequence
  Description of Artificial Sequence: Synthetic oligonucleotide
ugaaaagcuccg

SEQ ID NO: 717 - RNA, 11 nt, Artificial Sequence
  Description of Artificial Sequence: Synthetic oligonucleotide
aaaagcuccgg

SEQ ID NO: 718 - RNA, 13 nt, Artificial Sequence
  Description of Artificial Sequence: Synthetic oligonucleotide
agucaacagucug

SEQ ID NO: 719 - RNA, 13 nt, Artificial Sequence
  Description of Artificial Sequence: Synthetic oligonucleotide
cagaguucaaaag

SEQ ID NO: 720 - RNA, 13 nt, Artificial Sequence
  Description of Artificial Sequence: Synthetic oligonucleotide
agaguucaaaagc

SEQ ID NO: 721 - RNA, 12 nt, Artificial Sequence
  Description of Artificial Sequence: Synthetic oligonucleotide
uucaaaagcccu

SEQ ID NO: 722 - RNA, 12 nt, Artificial Sequence
  Description of Artificial Sequence: Synthetic oligonucleotide
ucaaaagcccuu

SEQ ID NO: 723 - RNA, 12 nt, Artificial Sequence
  Description of Artificial Sequence: Synthetic oligonucleotide
aaaagcccuuca

SEQ ID NO: 724 - RNA, 12 nt, Artificial Sequence
  Description of Artificial Sequence: Synthetic oligonucleotide
aaagcccuucag

SEQ ID NO: 725 - RNA, 13 nt, Artificial Sequence
  Description of Artificial Sequence: Synthetic oligonucleotide
gugaagccgcucg

SEQ ID NO: 726 - RNA, 12 nt, Artificial Sequence
  Description of Artificial Sequence: Synthetic oligonucleotide
cacgccagucaa

SEQ ID NO: 727 - RNA, 13 nt, Artificial Sequence
  Description of Artificial Sequence: Synthetic oligonucleotide
uucuuggugcgug

SEQ ID NO: 728 - RNA, 14 nt, Artificial Sequence
  Description of Artificial Sequence: Synthetic oligonucleotide
auuggauucaucag

SEQ ID NO: 729 - RNA, 13 nt, Artificial Sequence
  Description of Artificial Sequence: Synthetic oligonucleotide
uggaauaccuaag

SEQ ID NO: 730 - RNA, 12 nt, Artificial Sequence
  Description of Artificial Sequence: Synthetic oligonucleotide
auuugaggcuca

SEQ ID NO: 731 - RNA, 11 nt, Artificial Sequence
  Description of Artificial Sequence: Synthetic oligonucleotide
ucuacaauugg

SEQ ID NO: 732 - RNA, 12 nt, Artificial Sequence
  Description of Artificial Sequence: Synthetic oligonucleotide
uaguuaggagcc

SEQ ID NO: 733 - RNA, 13 nt, Artificial Sequence
  Description of Artificial Sequence: Synthetic oligonucleotide
agucaauauccac

SEQ ID NO: 734 - RNA, 13 nt, Artificial Sequence
  Description of Artificial Sequence: Synthetic oligonucleotide
auguucagucaca

SEQ ID NO: 735 - RNA, 12 nt, Artificial Sequence
  Description of Artificial Sequence: Synthetic oligonucleotide
acacacacauac

SEQ ID NO: 736 - RNA, 12 nt, Artificial Sequence
  Description of Artificial Sequence: Synthetic oligonucleotide
uuccuuuugcuu

SEQ ID NO: 737 - RNA, 16 nt, Artificial Sequence
  Description of Artificial Sequence: Synthetic oligonucleotide
uuuuaaaguaauuuuu

SEQ ID NO: 738 - RNA, 13 nt, Artificial Sequence
  Description of Artificial Sequence: Synthetic oligonucleotide
caacagucaaugg

SEQ ID NO: 739 - RNA, 13 nt, Artificial Sequence
  Description of Artificial Sequence: Synthetic oligonucleotide
ucgacaaaccaau

SEQ ID NO: 740 - RNA, 12 nt, Artificial Sequence
  Description of Artificial Sequence: Synthetic oligonucleotide
acugcuaccacu

SEQ ID NO: 741 - RNA, 13 nt, Artificial Sequence
  Description of Artificial Sequence: Synthetic oligonucleotide
gcaagcggucuua

SEQ ID NO: 742 - RNA, 13 nt, Artificial Sequence
  Description of Artificial Sequence: Synthetic oligonucleotide
ggucuuaccggcu

SEQ ID NO: 743 - RNA, 11 nt, Artificial Sequence
  Description of Artificial Sequence: Synthetic oligonucleotide
gauggguuacc

SEQ ID NO: 744 - RNA, 11 nt, Artificial Sequence
  Description of Artificial Sequence: Synthetic oligonucleotide
guuaccugcga

SEQ ID NO: 745 - RNA, 12 nt, Artificial Sequence
  Description of Artificial Sequence: Synthetic oligonucleotide
aaucuugcugag

SEQ ID NO: 746 - RNA, 13 nt, Artificial Sequence
  Description of Artificial Sequence: Synthetic oligonucleotide
agcauaaaacagu

SEQ ID NO: 747 - RNA, 12 nt, Artificial Sequence
  Description of Artificial Sequence: Synthetic oligonucleotide
guccuuuauccu

SEQ ID NO: 748 - RNA, 12 nt, Artificial Sequence
  Description of Artificial Sequence: Synthetic oligonucleotide
caacgcaaguug

SEQ ID NO: 749 - RNA, 13 nt, Artificial Sequence
  Description of Artificial Sequence: Synthetic oligonucleotide
aaacugaaaccau

SEQ ID NO: 750 - RNA, 14 nt, Artificial Sequence
  Description of Artificial Sequence: Synthetic oligonucleotide
acuuuguuaaauau

SEQ ID NO: 751 - RNA, 14 nt, Artificial Sequence
  Description of Artificial Sequence: Synthetic oligonucleotide
guauauuaaaaguu

SEQ ID NO: 752 - RNA, 13 nt, Artificial Sequence
  Description of Artificial Sequence: Synthetic oligonucleotide
guuuugacuuaac

SEQ ID NO: 753 - RNA, 13 nt, Artificial Sequence
  Description of Artificial Sequence: Synthetic oligonucleotide
gcaaacucagcac

SEQ ID NO: 754 - RNA, 11 nt, Artificial Sequence
  Description of Artificial Sequence: Synthetic oligonucleotide
ugcugaccuca

SEQ ID NO: 755 - RNA, 14 nt, Artificial Sequence
  Description of Artificial Sequence: Synthetic oligonucleotide
uuuauucagaucgc

SEQ ID NO: 756 - RNA, 13 nt, Artificial Sequence
  Description of Artificial Sequence: Synthetic oligonucleotide
aggguucugggau

SEQ ID NO: 757 - RNA, 15 nt, Artificial Sequence
  Description of Artificial Sequence: Synthetic oligonucleotide
auauuggaaauuaug

SEQ ID NO: 758 - RNA, 13 nt, Artificial Sequence
  Description of Artificial Sequence: Synthetic oligonucleotide
auggaagcacuag

SEQ ID NO: 759 - RNA, 13 nt, Artificial Sequence
  Description of Artificial Sequence: Synthetic oligonucleotide
guuuuuaugugga

SEQ ID NO: 760 - RNA, 12 nt, Artificial Sequence
  Description of Artificial Sequence: Synthetic oligonucleotide
ggaauugguaga

SEQ ID NO: 761 - RNA, 13 nt, Artificial Sequence
  Description of Artificial Sequence: Synthetic oligonucleotide
uuagacuuggaga

SEQ ID NO: 762 - RNA, 13 nt, Artificial Sequence
  Description of Artificial Sequence: Synthetic oligonucleotide
uuacaguauucca

SEQ ID NO: 763 - RNA, 15 nt, Artificial Sequence
  Description of Artificial Sequence: Synthetic oligonucleotide
ccacugaugaauuaa

SEQ ID NO: 764 - RNA, 12 nt, Artificial Sequence
  Description of Artificial Sequence: Synthetic oligonucleotide
ccacaucaucac

SEQ ID NO: 765 - RNA, 13 nt, Artificial Sequence
  Description of Artificial Sequence: Synthetic oligonucleotide
cucaccaaacaga

SEQ ID NO: 766 - RNA, 12 nt, Artificial Sequence
  Description of Artificial Sequence: Synthetic oligonucleotide
ggaacaugaugg

SEQ ID NO: 767 - RNA, 12 nt, Artificial Sequence
  Description of Artificial Sequence: Synthetic oligonucleotide
cauguagacugc

SEQ ID NO: 768 - RNA, 13 nt, Artificial Sequence
  Description of Artificial Sequence: Synthetic oligonucleotide
ggaucuauuuaug

SEQ ID NO: 769 - RNA, 12 nt, Artificial Sequence
  Description of Artificial Sequence: Synthetic oligonucleotide
gcacuauuauca

SEQ ID NO: 770 - RNA, 11 nt, Artificial Sequence
  Description of Artificial Sequence: Synthetic oligonucleotide
aucaguucugc

SEQ ID NO: 771 - RNA, 13 nt, Artificial Sequence
  Description of Artificial Sequence: Synthetic oligonucleotide
agauuaaaccuac

SEQ ID NO: 772 - RNA, 13 nt, Artificial Sequence
  Description of Artificial Sequence: Synthetic oligonucleotide
auaaaauccuucu

SEQ ID NO: 773 - RNA, 12 nt, Artificial Sequence
  Description of Artificial Sequence: Synthetic oligonucleotide
aaugcuguagac

SEQ ID NO: 774 - RNA, 13 nt, Artificial Sequence
  Description of Artificial Sequence: Synthetic oligonucleotide
uugauaggaauag

SEQ ID NO: 775 - RNA, 11 nt, Artificial Sequence
  Description of Artificial Sequence: Synthetic oligonucleotide
aauggcccuga

SEQ ID NO: 776 - RNA, 11 nt, Artificial Sequence
  Description of Artificial Sequence: Synthetic oligonucleotide
uuccucaagca

SEQ ID NO: 777 - RNA, 10 nt, Artificial Sequence
  Description of Artificial Sequence: Synthetic oligonucleotide
guucagccca

SEQ ID NO: 778 - RNA, 11 nt, Artificial Sequence
  Description of Artificial Sequence: Synthetic oligonucleotide
gcugcugaacc

SEQ ID NO: 779 - RNA, 12 nt, Artificial Sequence
  Description of Artificial Sequence: Synthetic oligonucleotide
aaguucucuuca

SEQ ID NO: 780 - RNA, 11 nt, Artificial Sequence
  Description of Artificial Sequence: Synthetic oligonucleotide
ccagccuagag

SEQ ID NO: 781 - RNA, 13 nt, Artificial Sequence
  Description of Artificial Sequence: Synthetic oligonucleotide
cucugugaagugu

SEQ ID NO: 782 - RNA, 14 nt, Artificial Sequence
  Description of Artificial Sequence: Synthetic oligonucleotide
ugagaaaauuucaa

SEQ ID NO: 783 - RNA, 11 nt, Artificial Sequence
  Description of Artificial Sequence: Synthetic oligonucleotide
aauccuccuga

SEQ ID NO: 784 - RNA, 12 nt, Artificial Sequence
  Description of Artificial Sequence: Synthetic oligonucleotide
gugacaucauau

SEQ ID NO: 785 - RNA, 13 nt, Artificial Sequence
  Description of Artificial Sequence: Synthetic oligonucleotide
aaucuucaucaua

SEQ ID NO: 786 - RNA, 13 nt, Artificial Sequence
  Description of Artificial Sequence: Synthetic oligonucleotide
gacuagcuauuaa

SEQ ID NO: 787 - RNA, 14 nt, Artificial Sequence
  Description of Artificial Sequence: Synthetic oligonucleotide
ucucuacuaaaaau

SEQ ID NO: 788 - RNA, 12 nt, Artificial Sequence
  Description of Artificial Sequence: Synthetic oligonucleotide
ucuaucucgccu

SEQ ID NO: 789 - RNA, 13 nt, Artificial Sequence
  Description of Artificial Sequence: Synthetic oligonucleotide
cuucgguccaguu

SEQ ID NO: 790 - RNA, 11 nt, Artificial Sequence
  Description of Artificial Sequence: Synthetic oligonucleotide
gauguagccgc

SEQ ID NO: 791 - RNA, 12 nt, Artificial Sequence
  Description of Artificial Sequence: Synthetic oligonucleotide
ugaggagacuug

SEQ ID NO: 792 - RNA, 12 nt, Artificial Sequence
  Description of Artificial Sequence: Synthetic oligonucleotide
gaguagugagga

SEQ ID NO: 793 - RNA, 14 nt, Artificial Sequence
  Description of Artificial Sequence: Synthetic oligonucleotide
cagaugaguacaaa

SEQ ID NO: 794 - RNA, 13 nt, Artificial Sequence
  Description of Artificial Sequence: Synthetic oligonucleotide
guuguuaaugggc

SEQ ID NO: 795 - RNA, 13 nt, Artificial Sequence
  Description of Artificial Sequence: Synthetic oligonucleotide
uuuuuaauuuauu

SEQ ID NO: 796 - RNA, 12 nt, Artificial Sequence
  Description of Artificial Sequence: Synthetic oligonucleotide
uauuuaaauaug

SEQ ID NO: 797 - RNA, 13 nt, Artificial Sequence
  Description of Artificial Sequence: Synthetic oligonucleotide
uauccuuuguuuc

SEQ ID NO: 798 - RNA, 14 nt, Artificial Sequence
  Description of Artificial Sequence: Synthetic oligonucleotide
cgucuaaguguuug

SEQ ID NO: 799 - RNA, 12 nt, Artificial Sequence
  Description of Artificial Sequence: Synthetic oligonucleotide
accugugacaaa

SEQ ID NO: 800 - RNA, 13 nt, Artificial Sequence
  Description of Artificial Sequence: Synthetic oligonucleotide
ccaggcugaauua

SEQ ID NO: 801 - RNA, 14 nt, Artificial Sequence
  Description of Artificial Sequence: Synthetic oligonucleotide
gucauucuuacaau

SEQ ID NO: 802 - RNA, 15 nt, Artificial Sequence
  Description of Artificial Sequence: Synthetic oligonucleotide
ucauucuuacaauug

SEQ ID NO: 803 - RNA, 12 nt, Artificial Sequence
  Description of Artificial Sequence: Synthetic oligonucleotide
cagagaguguac

SEQ ID NO: 804 - RNA, 12 nt, Artificial Sequence
  Description of Artificial Sequence: Synthetic oligonucleotide
agaacucagcag

SEQ ID NO: 805 - RNA, 13 nt, Artificial Sequence
  Description of Artificial Sequence: Synthetic oligonucleotide
uuuauuuucagua

SEQ ID NO: 806 - RNA, 12 nt, Artificial Sequence
  Description of Artificial Sequence: Synthetic oligonucleotide
ucuuaaauggaa

SEQ ID NO: 807 - RNA, 13 nt, Artificial Sequence
  Description of Artificial Sequence: Synthetic oligonucleotide
ugccuaaaauugu

SEQ ID NO: 808 - RNA, 12 nt, Artificial Sequence
  Description of Artificial Sequence: Synthetic oligonucleotide
agacugugagcu

SEQ ID NO: 809 - RNA, 14 nt, Artificial Sequence
  Description of Artificial Sequence: Synthetic oligonucleotide
ugcuuuuuauuaau

SEQ ID NO: 810 - RNA, 13 nt, Artificial Sequence
  Description of Artificial Sequence: Synthetic oligonucleotide
cucuucuuacauu

SEQ ID NO: 811 - RNA, 15 nt, Artificial Sequence
  Description of Artificial Sequence: Synthetic oligonucleotide
cauuuguaaaaaugu

SEQ ID NO: 812 - RNA, 15 nt, Artificial Sequence
  Description of Artificial Sequence: Synthetic oligonucleotide
aucuuaauucauauu

SEQ ID NO: 813 - RNA, 13 nt, Artificial Sequence
  Description of Artificial Sequence: Synthetic oligonucleotide
gaacuaaucauga

SEQ ID NO: 814 - RNA, 12 nt, Artificial Sequence
  Description of Artificial Sequence: Synthetic oligonucleotide
ucugcucuuggg

SEQ ID NO: 815 - RNA, 13 nt, Artificial Sequence
  Description of Artificial Sequence: Synthetic oligonucleotide
caguagcuuugag

SEQ ID NO: 816 - RNA, 14 nt, Artificial Sequence
  Description of Artificial Sequence: Synthetic oligonucleotide
cacguaauauuuca

SEQ ID NO: 817 - RNA, 13 nt, Artificial Sequence
  Description of Artificial Sequence: Synthetic oligonucleotide
uauucucuucacu

SEQ ID NO: 818 - RNA, 14 nt, Artificial Sequence
  Description of Artificial Sequence: Synthetic oligonucleotide
cuaaugcuaagaaa

SEQ ID NO: 819 - RNA, 12 nt, Artificial Sequence
  Description of Artificial Sequence: Synthetic oligonucleotide
gcugaaaaucaa

SEQ ID NO: 820 - RNA, 14 nt, Artificial Sequence
  Description of Artificial Sequence: Synthetic oligonucleotide
aauaugauuacuuu

SEQ ID NO: 821 - RNA, 14 nt, Artificial Sequence
  Description of Artificial Sequence: Synthetic oligonucleotide
cauuuuguucuaca

SEQ ID NO: 822 - RNA, 12 nt, Artificial Sequence
  Description of Artificial Sequence: Synthetic oligonucleotide
cccgggacucuc

SEQ ID NO: 823 - RNA, 14 nt, Artificial Sequence
  Description of Artificial Sequence: Synthetic oligonucleotide
ccuuuaaaguaaag

SEQ ID NO: 824 - RNA, 13 nt, Artificial Sequence
  Description of Artificial Sequence: Synthetic oligonucleotide
ucuggaagccugg

SEQ ID NO: 825 - RNA, 14 nt, Artificial Sequence
  Description of Artificial Sequence: Synthetic oligonucleotide
aaaacaaaagagag

SEQ ID NO: 826 - RNA, 13 nt, Artificial Sequence
  Description of Artificial Sequence: Synthetic oligonucleotide
aucaguuaugccg

SEQ ID NO: 827 - RNA, 13 nt, Artificial Sequence
  Description of Artificial Sequence: Synthetic oligonucleotide
uaaaagaagucca

SEQ ID NO: 828 - RNA, 11 nt, Artificial Sequence
  Description of Artificial Sequence: Synthetic oligonucleotide
aggugagguua

SEQ ID NO: 829 - RNA, 11 nt, Artificial Sequence
  Description of Artificial Sequence: Synthetic oligonucleotide
gggaagaggac

SEQ ID NO: 830 - RNA, 13 nt, Artificial Sequence
  Description of Artificial Sequence: Synthetic oligonucleotide
aagcaaguauugu

SEQ ID NO: 831 - RNA, 12 nt, Artificial Sequence
  Description of Artificial Sequence: Synthetic oligonucleotide
auuguagcacuc

SEQ ID NO: 832 - RNA, 14 nt, Artificial Sequence
  Description of Artificial Sequence: Synthetic oligonucleotide
acaaaaccacaaau

SEQ ID NO: 833 - RNA, 12 nt, Artificial Sequence
  Description of Artificial Sequence: Synthetic oligonucleotide
uaagcccauaca

SEQ ID NO: 834 - RNA, 11 nt, Artificial Sequence
  Description of Artificial Sequence: Synthetic oligonucleotide
agcccauacag

SEQ ID NO: 835 - RNA, 12 nt, Artificial Sequence
  Description of Artificial Sequence: Synthetic oligonucleotide
cagaaaccuucc

SEQ ID NO: 836 - RNA, 10 nt, Artificial Sequence
  Description of Artificial Sequence: Synthetic oligonucleotide
guauaccuac

SEQ ID NO: 837 - RNA, 13 nt, Artificial Sequence
  Description of Artificial Sequence: Synthetic oligonucleotide
gccaguuuucgga

SEQ ID NO: 838 - RNA, 9 nt, Artificial Sequence
  Description of Artificial Sequence: Synthetic oligonucleotide
ggaacaggg

SEQ ID NO: 839 - RNA, 13 nt, Artificial Sequence
  Description of Artificial Sequence: Synthetic oligonucleotide
uuaacuuuccagu

SEQ ID NO: 840 - RNA, 14 nt, Artificial Sequence
  Description of Artificial Sequence: Synthetic oligonucleotide
aaaguuugguuuug

SEQ ID NO: 841 - RNA, 12 nt, Artificial Sequence
  Description of Artificial Sequence: Synthetic oligonucleotide
cuucccacugua

SEQ ID NO: 842 - RNA, 13 nt, Artificial Sequence
  Description of Artificial Sequence: Synthetic oligonucleotide
ugauaccauauga

SEQ ID NO: 843 - RNA, 11 nt, Artificial Sequence
  Description of Artificial Sequence: Synthetic oligonucleotide
aacaugggcug

SEQ ID NO: 844 - RNA, 13 nt, Artificial Sequence
  Description of Artificial Sequence: Synthetic oligonucleotide
caacuuuuucaua

SEQ ID NO: 845 - RNA, 12 nt, Artificial Sequence
  Description of Artificial Sequence: Synthetic oligonucleotide
caugaggccgga

SEQ ID NO: 846 - RNA, 11 nt, Artificial Sequence
  Description of Artificial Sequence: Synthetic oligonucleotide
acugcauuugu

SEQ ID NO: 847 - RNA, 13 nt, Artificial Sequence
  Description of Artificial Sequence: Synthetic oligonucleotide
aauguuuacuacc

SEQ ID NO: 848 - RNA, 15 nt, Artificial Sequence
  Description of Artificial Sequence: Synthetic oligonucleotide
aauuuuuugaugaaa

SEQ ID NO: 849 - RNA, 14 nt, Artificial Sequence
  Description of Artificial Sequence: Synthetic oligonucleotide
cagugugugaauuu

SEQ ID NO: 850 - RNA, 13 nt, Artificial Sequence
  Description of Artificial Sequence: Synthetic oligonucleotide
gagcaauguaugu

SEQ ID NO: 851 - RNA, 14 nt, Artificial Sequence
  Description of Artificial Sequence: Synthetic oligonucleotide
aaagcacauauaua

SEQ ID NO: 852 - RNA, 14 nt, Artificial Sequence
  Description of Artificial Sequence: Synthetic oligonucleotide
guaauaguuucucc

SEQ ID NO: 853 - RNA, 13 nt, Artificial Sequence
  Description of Artificial Sequence: Synthetic oligonucleotide
aguuucuccaaau

SEQ ID NO: 854 - RNA, 13 nt, Artificial Sequence
  Description of Artificial Sequence: Synthetic oligonucleotide
uacuuccuagaaa

SEQ ID NO: 855 - RNA, 13 nt, Artificial Sequence
  Description of Artificial Sequence: Synthetic oligonucleotide
uacaccauauaug

SEQ ID NO: 856 - RNA, 14 nt, Artificial Sequence
  Description of Artificial Sequence: Synthetic oligonucleotide
auauaugaauggag

SEQ ID NO: 857 - RNA, 13 nt, Artificial Sequence
  Description of Artificial Sequence: Synthetic oligonucleotide
acgagaagaagau

SEQ ID NO: 858 - RNA, 13 nt, Artificial Sequence
  Description of Artificial Sequence: Synthetic oligonucleotide
ucauuuacaggga

SEQ ID NO: 859 - RNA, 13 nt, Artificial Sequence
  Description of Artificial Sequence: Synthetic oligonucleotide
cauuuacagggac

SEQ ID NO: 860 - RNA, 10 nt, Artificial Sequence
  Description of Artificial Sequence: Synthetic oligonucleotide
agggaccuga

SEQ ID NO: 861 - RNA, 14 nt, Artificial Sequence
  Description of Artificial Sequence: Synthetic oligonucleotide
uguuugacugcauc

SEQ ID NO: 862 - RNA, 13 nt, Artificial Sequence
  Description of Artificial Sequence: Synthetic oligonucleotide
uuugacugcaucg

SEQ ID NO: 863 - RNA, 12 nt, Artificial Sequence
  Description of Artificial Sequence: Synthetic oligonucleotide
gaguucacaggg

SEQ ID NO: 864 - RNA, 13 nt, Artificial Sequence
  Description of Artificial Sequence: Synthetic oligonucleotide
ggcaccucugucc

SEQ ID NO: 865 - RNA, 15 nt, Artificial Sequence
  Description of Artificial Sequence: Synthetic oligonucleotide
gguuugucuuuuuaa

SEQ ID NO: 866 - RNA, 14 nt, Artificial Sequence
  Description of Artificial Sequence: Synthetic oligonucleotide
uuugucuuuuuaag

SEQ ID NO: 867 - RNA, 13 nt, Artificial Sequence
  Description of Artificial Sequence: Synthetic oligonucleotide
ccuaaagguuguc

SEQ ID NO: 868 - RNA, 12 nt, Artificial Sequence
  Description of Artificial Sequence: Synthetic oligonucleotide
aagguugucgac

SEQ ID NO: 869 - RNA, 13 nt, Artificial Sequence
  Description of Artificial Sequence: Synthetic oligonucleotide
accuggcaauugu

SEQ ID NO: 870 - RNA, 12 nt, Artificial Sequence
  Description of Artificial Sequence: Synthetic oligonucleotide
aguggugcgagg

SEQ ID NO: 871 - RNA, 13 nt, Artificial Sequence
  Description of Artificial Sequence: Synthetic oligonucleotide
agagacaugaaau

SEQ ID NO: 872 - RNA, 13 nt, Artificial Sequence
  Description of Artificial Sequence: Synthetic oligonucleotide
auauauuucucca

SEQ ID NO: 873 - RNA, 10 nt, Artificial Sequence
  Description of Artificial Sequence: Synthetic oligonucleotide
caugaaggcu

SEQ ID NO: 874 - RNA, 11 nt, Artificial Sequence
  Description of Artificial Sequence: Synthetic oligonucleotide
gcuggaguggu

SEQ ID NO: 875 - RNA, 11 nt, Artificial Sequence
  Description of Artificial Sequence: Synthetic oligonucleotide
aggaagagagg

SEQ ID NO: 876 - RNA, 12 nt, Artificial Sequence
  Description of Artificial Sequence: Synthetic oligonucleotide
cuugcaucgggc

SEQ ID NO: 877 - RNA, 13 nt, Artificial Sequence
  Description of Artificial Sequence: Synthetic oligonucleotide
auauccuacugug

SEQ ID NO: 878 - RNA, 13 nt, Artificial Sequence
  Description of Artificial Sequence: Synthetic oligonucleotide
uccuacuguguaa

SEQ ID NO: 879 - RNA, 12 nt, Artificial Sequence
  Description of Artificial Sequence: Synthetic oligonucleotide
ccuuguagugua

SEQ ID NO: 880 - RNA, 13 nt, Artificial Sequence
  Description of Artificial Sequence: Synthetic oligonucleotide
ucuuuguugauug

SEQ ID NO: 881 - RNA, 14 nt, Artificial Sequence
  Description of Artificial Sequence: Synthetic oligonucleotide
uuuguugauugaaa

SEQ ID NO: 882 - RNA, 15 nt, Artificial Sequence
  Description of Artificial Sequence: Synthetic oligonucleotide
uucuuuuucuuccau

SEQ ID NO: 883 - RNA, 13 nt, Artificial Sequence
  Description of Artificial Sequence: Synthetic oligonucleotide
aaucuuccuucua

SEQ ID NO: 884 - RNA, 13 nt, Artificial Sequence
  Description of Artificial Sequence: Synthetic oligonucleotide
uugaaugcuucau

SEQ ID NO: 885 - RNA, 13 nt, Artificial Sequence
  Description of Artificial Sequence: Synthetic oligonucleotide
ugaaugcuucaug

SEQ ID NO: 886 - RNA, 13 nt, Artificial Sequence
  Description of Artificial Sequence: Synthetic oligonucleotide
aauucuacuuuga

SEQ ID NO: 887 - RNA, 13 nt, Artificial Sequence
  Description of Artificial Sequence: Synthetic oligonucleotide
agcaacuacagac

SEQ ID NO: 888 - RNA, 13 nt, Artificial Sequence
  Description of Artificial Sequence: Synthetic oligonucleotide
gaccaaggucaac

SEQ ID NO: 889 - RNA, 13 nt, Artificial Sequence
  Description of Artificial Sequence: Synthetic oligonucleotide
cgacuaucucgac

SEQ ID NO: 890 - RNA, 13 nt, Artificial Sequence
  Description of Artificial Sequence: Synthetic oligonucleotide
aaccuucccaaac

SEQ ID NO: 891 - RNA, 14 nt, Artificial Sequence
  Description of Artificial Sequence: Synthetic oligonucleotide
ccaagcuuagaacu

SEQ ID NO: 892 - RNA, 15 nt, Artificial Sequence
  Description of Artificial Sequence: Synthetic oligonucleotide
agcuuagaacuuuaa

SEQ ID NO: 893 - RNA, 11 nt, Artificial Sequence
  Description of Artificial Sequence: Synthetic oligonucleotide
aagaccaccac

SEQ ID NO: 894 - RNA, 14 nt, Artificial Sequence
  Description of Artificial Sequence: Synthetic oligonucleotide
gcgagaaauaaagu

SEQ ID NO: 895 - RNA, 14 nt, Artificial Sequence
  Description of Artificial Sequence: Synthetic oligonucleotide
cgagaaauaaaguu

SEQ ID NO: 896 - RNA, 12 nt, Artificial Sequence
  Description of Artificial Sequence: Synthetic oligonucleotide
aggaaaugaucc

SEQ ID NO: 897 - RNA, 13 nt, Artificial Sequence
  Description of Artificial Sequence: Synthetic oligonucleotide
gaagaaaugaaac

SEQ ID NO: 898 - RNA, 13 nt, Artificial Sequence
  Description of Artificial Sequence: Synthetic oligonucleotide
guuuccauccucc

SEQ ID NO: 899 - RNA, 15 nt, Artificial Sequence
  Description of Artificial Sequence: Synthetic oligonucleotide
acugaaaaucuuuga

SEQ ID NO: 900 - RNA, 11 nt, Artificial Sequence
  Description of Artificial Sequence: Synthetic oligonucleotide
ugccguucagg

SEQ ID NO: 901 - RNA, 13 nt, Artificial Sequence
  Description of Artificial Sequence: Synthetic oligonucleotide
caggguccagaag

SEQ ID NO: 902 - RNA, 13 nt, Artificial Sequence
  Description of Artificial Sequence: Synthetic oligonucleotide
ucaagacugcuug

SEQ ID NO: 903 - RNA, 13 nt, Artificial Sequence
  Description of Artificial Sequence: Synthetic oligonucleotide
uccaugucuuugg

SEQ ID NO: 904 - RNA, 11 nt, Artificial Sequence
  Description of Artificial Sequence: Synthetic oligonucleotide
gccugaaacac

SEQ ID NO: 905 - RNA, 12 nt, Artificial Sequence
  Description of Artificial Sequence: Synthetic oligonucleotide
ucucuguaccuc

SEQ ID NO: 906 - RNA, 12 nt, Artificial Sequence
  Description of Artificial Sequence: Synthetic oligonucleotide
agcaagacaaga

SEQ ID NO: 907 - RNA, 13 nt, Artificial Sequence
  Description of Artificial Sequence: Synthetic oligonucleotide
gcaagacaagaaa

SEQ ID NO: 908 - RNA, 12 nt, Artificial Sequence
  Description of Artificial Sequence: Synthetic oligonucleotide
uguacaagaucc

SEQ ID NO: 909 - RNA, 12 nt, Artificial Sequence
  Description of Artificial Sequence: Synthetic oligonucleotide
cguacuugcaga

SEQ ID NO: 910 - RNA, 13 nt, Artificial Sequence
  Description of Artificial Sequence: Synthetic oligonucleotide
cgaucgauacaga

SEQ ID NO: 911 - RNA, 13 nt, Artificial Sequence
  Description of Artificial Sequence: Synthetic oligonucleotide
uauaaaaauaaau

SEQ ID NO: 912 - RNA, 13 nt, Artificial Sequence
  Description of Artificial Sequence: Synthetic oligonucleotide
uaaaaauaaauau

SEQ ID NO: 913 - RNA, 13 nt, Artificial Sequence
  Description of Artificial Sequence: Synthetic oligonucleotide
uuugacugcugug

SEQ ID NO: 914 - RNA, 13 nt, Artificial Sequence
  Description of Artificial Sequence: Synthetic oligonucleotide
ggagaugagagac

SEQ ID NO: 915 - RNA, 10 nt, Artificial Sequence
  Description of Artificial Sequence: Synthetic oligonucleotide
ucccacuugg

SEQ ID NO: 916 - RNA, 10 nt, Artificial Sequence
  Description of Artificial Sequence: Synthetic oligonucleotide
guucacggcc

SEQ ID NO: 917 - RNA, 12 nt, Artificial Sequence
  Description of Artificial Sequence: Synthetic oligonucleotide
accaucacacca

SEQ ID NO: 918 - RNA, 10 nt, Artificial Sequence
  Description of Artificial Sequence: Synthetic oligonucleotide
cugcggguuu

SEQ ID NO: 919 - RNA, 9 nt, Artificial Sequence
  Description of Artificial Sequence: Synthetic oligonucleotide
uccaguuug

SEQ ID NO: 920 - RNA, 12 nt, Artificial Sequence
  Description of Artificial Sequence: Synthetic oligonucleotide
uuaaggacuucu

SEQ ID NO: 921 - RNA, 12 nt, Artificial Sequence
  Description of Artificial Sequence: Synthetic oligonucleotide
agugggacagag

SEQ ID NO: 922 - RNA, 13 nt, Artificial Sequence
  Description of Artificial Sequence: Synthetic oligonucleotide
auuuguuauugug

SEQ ID NO: 923 - RNA, 12 nt, Artificial Sequence
  Description of Artificial Sequence: Synthetic oligonucleotide
ucaaaugcauuu

SEQ ID NO: 924 - RNA, 9 nt, Artificial Sequence
  Description of Artificial Sequence: Synthetic oligonucleotide
aggaaagcc

SEQ ID NO: 925 - RNA, 10 nt, Artificial Sequence
  Description of Artificial Sequence: Synthetic oligonucleotide
ggaaagcccu

SEQ ID NO: 926 - RNA, 11 nt, Artificial Sequence
  Description of Artificial Sequence: Synthetic oligonucleotide
ccagcauggcc

SEQ ID NO: 927 - RNA, 10 nt, Artificial Sequence
  Description of Artificial Sequence: Synthetic oligonucleotide
uucucccuga

SEQ ID NO: 928 - RNA, 11 nt, Artificial Sequence
  Description of Artificial Sequence: Synthetic oligonucleotide
aagaagcccuu

SEQ ID NO: 929 - RNA, 11 nt, Artificial Sequence
  Description of Artificial Sequence: Synthetic oligonucleotide
gaagcccuuca

SEQ ID NO: 930 - RNA, 10 nt, Artificial Sequence
  Description of Artificial Sequence: Synthetic oligonucleotide
cccuucagcg

SEQ ID NO: 931 - RNA, 10 nt, Artificial Sequence
  Description of Artificial Sequence: Synthetic oligonucleotide
cuucagcggc

SEQ ID NO: 932 - RNA, 11 nt, Artificial Sequence
  Description of Artificial Sequence: Synthetic oligonucleotide
cagcggccagu

SEQ ID NO: 933 - RNA, 11 nt, Artificial Sequence
  Description of Artificial Sequence: Synthetic oligonucleotide
gaaaagcuccg

SEQ ID NO: 934 - RNA, 10 nt, Artificial Sequence
  Description of Artificial Sequence: Synthetic oligonucleotide
aaagcuccgg

SEQ ID NO: 935 - RNA, 12 nt, Artificial Sequence
  Description of Artificial Sequence: Synthetic oligonucleotide
gucaacagucug

SEQ ID NO: 936 - RNA, 12 nt, Artificial Sequence
  Description of Artificial Sequence: Synthetic oligonucleotide
agaguucaaaag

SEQ ID NO: 937 - RNA, 12 nt, Artificial Sequence
  Description of Artificial Sequence: Synthetic oligonucleotide
gaguucaaaagc

SEQ ID NO: 938 - RNA, 11 nt, Artificial Sequence
  Description of Artificial Sequence: Synthetic oligonucleotide
ucaaaagcccu

SEQ ID NO: 939 - RNA, 11 nt, Artificial Sequence
  Description of Artificial Sequence: Synthetic oligonucleotide
caaaagcccuu

SEQ ID NO: 940 - RNA, 11 nt, Artificial Sequence
  Description of Artificial Sequence: Synthetic oligonucleotide
aaagcccuuca

SEQ ID NO: 941 - RNA, 11 nt, Artificial Sequence
  Description of Artificial Sequence: Synthetic oligonucleotide
aagcccuucag

SEQ ID NO: 942 - RNA, 12 nt, Artificial Sequence
  Description of Artificial Sequence: Synthetic oligonucleotide
ugaagccgcucg

SEQ ID NO: 943 - RNA, 11 nt, Artificial Sequence
  Description of Artificial Sequence: Synthetic oligonucleotide
acgccagucaa

SEQ ID NO: 944 - RNA, 12 nt, Artificial Sequence
  Description of Artificial Sequence: Synthetic oligonucleotide
ucuuggugcgug

SEQ ID NO: 945 - RNA, 13 nt, Artificial Sequence
  Description of Artificial Sequence: Synthetic oligonucleotide
uuggauucaucag

SEQ ID NO: 946 - RNA, 12 nt, Artificial Sequence
  Description of Artificial Sequence: Synthetic oligonucleotide
ggaauaccuaag

SEQ ID NO: 947 - RNA, 11 nt, Artificial Sequence
  Description of Artificial Sequence: Synthetic oligonucleotide
uuugaggcuca

SEQ ID NO: 948 - RNA, 10 nt, Artificial Sequence
  Description of Artificial Sequence: Synthetic oligonucleotide
cuacaauugg

SEQ ID NO: 949 - RNA, 11 nt, Artificial Sequence
  Description of Artificial Sequence: Synthetic oligonucleotide
aguuaggagcc

SEQ ID NO: 950 - RNA, 12 nt, Artificial Sequence
  Description of Artificial Sequence: Synthetic oligonucleotide
gucaauauccac

SEQ ID NO: 951 - RNA, 12 nt, Artificial Sequence
  Description of Artificial Sequence: Synthetic oligonucleotide
uguucagucaca

SEQ ID NO: 952 - RNA, 11 nt, Artificial Sequence
  Description of Artificial Sequence: Synthetic oligonucleotide
cacacacauac

SEQ ID NO: 953 - RNA, 11 nt, Artificial Sequence
  Description of Artificial Sequence: Synthetic oligonucleotide
uccuuuugcuu

SEQ ID NO: 954 - RNA, 15 nt, Artificial Sequence
  Description of Artificial Sequence: Synthetic oligonucleotide
uuuaaaguaauuuuu

SEQ ID NO: 955 - RNA, 12 nt, Artificial Sequence
  Description of Artificial Sequence: Synthetic oligonucleotide
aacagucaaugg

SEQ ID NO: 956 - RNA, 12 nt, Artificial Sequence
  Description of Artificial Sequence: Synthetic oligonucleotide
cgacaaaccaau

SEQ ID NO: 957 - RNA, 11 nt, Artificial Sequence
  Description of Artificial Sequence: Synthetic oligonucleotide
cugcuaccacu

SEQ ID NO: 958 - RNA, 12 nt, Artificial Sequence
  Description of Artificial Sequence: Synthetic oligonucleotide
caagcggucuua

SEQ ID NO: 959 - RNA, 12 nt, Artificial Sequence
  Description of Artificial Sequence: Synthetic oligonucleotide
gucuuaccggcu

SEQ ID NO: 960 - RNA, 10 nt, Artificial Sequence
  Description of Artificial Sequence: Synthetic oligonucleotide
auggguuacc

SEQ ID NO: 961 - RNA, 10 nt, Artificial Sequence
  Description of Artificial Sequence: Synthetic oligonucleotide
uuaccugcga

SEQ ID NO: 962 - RNA, 11 nt, Artificial Sequence
  Description of Artificial Sequence: Synthetic oligonucleotide
aucuugcugag

SEQ ID NO: 963 - RNA, 12 nt, Artificial Sequence
  Description of Artificial Sequence: Synthetic oligonucleotide
gcauaaaacagu

SEQ ID NO: 964 - RNA, 11 nt, Artificial Sequence
  Description of Artificial Sequence: Synthetic oligonucleotide
uccuuuauccu

SEQ ID NO: 965 - RNA, 11 nt, Artificial Sequence
  Description of Artificial Sequence: Synthetic oligonucleotide
aacgcaaguug

SEQ ID NO: 966 - RNA, 12 nt, Artificial Sequence
  Description of Artificial Sequence: Synthetic oligonucleotide
aacugaaaccau

SEQ ID NO: 967 - RNA, 13 nt, Artificial Sequence
  Description of Artificial Sequence: Synthetic oligonucleotide
cuuuguuaaauau

SEQ ID NO: 968 - RNA, 13 nt, Artificial Sequence
  Description of Artificial Sequence: Synthetic oligonucleotide
uauauuaaaaguu

SEQ ID NO: 969 - RNA, 12 nt, Artificial Sequence
  Description of Artificial Sequence: Synthetic oligonucleotide
uuuugacuuaac

SEQ ID NO: 970 - RNA, 12 nt, Artificial Sequence
  Description of Artificial Sequence: Synthetic oligonucleotide
caaacucagcac

SEQ ID NO: 971 - RNA, 10 nt, Artificial Sequence
  Description of Artificial Sequence: Synthetic oligonucleotide
gcugaccuca

SEQ ID NO: 972 - RNA, 13 nt, Artificial Sequence
  Description of Artificial Sequence: Synthetic oligonucleotide
uuauucagaucgc

SEQ ID NO: 973 - RNA, 12 nt, Artificial Sequence
  Description of Artificial Sequence: Synthetic oligonucleotide
ggguucugggau

SEQ ID NO: 974 - RNA, 14 nt, Artificial Sequence
  Description of Artificial Sequence: Synthetic oligonucleotide
uauuggaaauuaug

SEQ ID NO: 975 - RNA, 12 nt, Artificial Sequence
  Description of Artificial Sequence: Synthetic oligonucleotide
uggaagcacuag

SEQ ID NO: 976 - RNA, 12 nt, Artificial Sequence
  Description of Artificial Sequence: Synthetic oligonucleotide
uuuuuaugugga

SEQ ID NO: 977 - RNA, 11 nt, Artificial Sequence
  Description of Artificial Sequence: Synthetic oligonucleotide
gaauugguaga

SEQ ID NO: 978 - RNA, 12 nt, Artificial Sequence
  Description of Artificial Sequence: Synthetic oligonucleotide
uagacuuggaga

SEQ ID NO: 979 - RNA, 12 nt, Artificial Sequence
  Description of Artificial Sequence: Synthetic oligonucleotide
uacaguauucca

SEQ ID NO: 980 - RNA, 14 nt, Artificial Sequence
  Description of Artificial Sequence: Synthetic oligonucleotide
cacugaugaauuaa

SEQ ID NO: 981 - RNA, 11 nt, Artificial Sequence
  Description of Artificial Sequence: Synthetic oligonucleotide
cacaucaucac

SEQ ID NO: 982 - RNA, 12 nt, Artificial Sequence
  Description of Artificial Sequence: Synthetic oligonucleotide
ucaccaaacaga

SEQ ID NO: 983 - RNA, 11 nt, Artificial Sequence
  Description of Artificial Sequence: Synthetic oligonucleotide
gaacaugaugg

SEQ ID NO: 984 - RNA, 11 nt, Artificial Sequence
  Description of Artificial Sequence: Synthetic oligonucleotide
auguagacugc

SEQ ID NO: 985 - RNA, 12 nt, Artificial Sequence
  Description of Artificial Sequence: Synthetic oligonucleotide
gaucuauuuaug

SEQ ID NO: 986 - RNA, 11 nt, Artificial Sequence
  Description of Artificial Sequence: Synthetic oligonucleotide
cacuauuauca

SEQ ID NO: 987 - RNA, 10 nt, Artificial Sequence
  Description of Artificial Sequence: Synthetic oligonucleotide
ucaguucugc

SEQ ID NO: 988 - RNA, 12 nt, Artificial Sequence
  Description of Artificial Sequence: Synthetic oligonucleotide
gauuaaaccuac

SEQ ID NO: 989 - RNA, 12 nt, Artificial Sequence
  Description of Artificial Sequence: Synthetic oligonucleotide
uaaaauccuucu

SEQ ID NO: 990 - RNA, 11 nt, Artificial Sequence
  Description of Artificial Sequence: Synthetic oligonucleotide
augcuguagac

SEQ ID NO: 991 - RNA, 12 nt, Artificial Sequence
  Description of Artificial Sequence: Synthetic oligonucleotide
ugauaggaauag

SEQ ID NO: 992 - RNA, 10 nt, Artificial Sequence
  Description of Artificial Sequence: Synthetic oligonucleotide
auggcccuga

SEQ ID NO: 993 - RNA, 10 nt, Artificial Sequence
  Description of Artificial Sequence: Synthetic oligonucleotide
uccucaagca

SEQ ID NO: 994 - RNA, 9 nt, Artificial Sequence
  Description of Artificial Sequence: Synthetic oligonucleotide
uucagccca

SEQ ID NO: 995 - RNA, 10 nt, Artificial Sequence
  Description of Artificial Sequence: Synthetic oligonucleotide
cugcugaacc

SEQ ID NO: 996 - RNA, 11 nt, Artificial Sequence
  Description of Artificial Sequence: Synthetic oligonucleotide
aguucucuuca

SEQ ID NO: 997 - RNA, 10 nt, Artificial Sequence
  Description of Artificial Sequence: Synthetic oligonucleotide
cagccuagag

SEQ ID NO: 998 - RNA, 12 nt, Artificial Sequence
  Description of Artificial Sequence: Synthetic oligonucleotide
ucugugaagugu

SEQ ID NO: 999 - RNA, 13 nt, Artificial Sequence
  Description of Artificial Sequence: Synthetic oligonucleotide
gagaaaauuucaa

SEQ ID NO: 1000 - RNA, 10 nt, Artificial Sequence
  Description of Artificial Sequence: Synthetic oligonucleotide
auccuccuga

SEQ ID NO: 1001 - RNA, 11 nt, Artificial Sequence
  Description of Artificial Sequence: Synthetic oligonucleotide
ugacaucauau

SEQ ID NO: 1002 - RNA, 12 nt, Artificial Sequence
  Description of Artificial Sequence: Synthetic oligonucleotide
aucuucaucaua

SEQ ID NO: 1003 - RNA, 12 nt, Artificial Sequence
  Description of Artificial Sequence: Synthetic oligonucleotide
acuagcuauuaa

SEQ ID NO: 1004 - RNA, 13 nt, Artificial Sequence
  Description of Artificial Sequence: Synthetic oligonucleotide
cucuacuaaaaau

SEQ ID NO: 1005 - RNA, 11 nt, Artificial Sequence
  Description of Artificial Sequence: Synthetic oligonucleotide
cuaucucgccu

SEQ ID NO: 1006 - RNA, 12 nt, Artificial Sequence
  Description of Artificial Sequence: Synthetic oligonucleotide
uucgguccaguu

SEQ ID NO: 1007 - RNA, 10 nt, Artificial Sequence
  Description of Artificial Sequence: Synthetic oligonucleotide
auguagccgc

SEQ ID NO: 1008 - RNA, 11 nt, Artificial Sequence
  Description of Artificial Sequence: Synthetic oligonucleotide
gaggagacuug

SEQ ID NO: 1009 - RNA, 11 nt, Artificial Sequence
  Description of Artificial Sequence: Synthetic oligonucleotide
aguagugagga

SEQ ID NO: 1010 - RNA, 13 nt, Artificial Sequence
  Description of Artificial Sequence: Synthetic oligonucleotide
agaugaguacaaa

SEQ ID NO: 1011 - RNA, 12 nt, Artificial Sequence
  Description of Artificial Sequence: Synthetic oligonucleotide
uuguuaaugggc

SEQ ID NO: 1012 - RNA, 12 nt, Artificial Sequence
  Description of Artificial Sequence: Synthetic oligonucleotide
uuuuaauuuauu

SEQ ID NO: 1013 - RNA, 11 nt, Artificial Sequence
  Description of Artificial Sequence: Synthetic oligonucleotide
auuuaaauaug

SEQ ID NO: 1014 - RNA, 12 nt, Artificial Sequence
  Description of Artificial Sequence: Synthetic oligonucleotide
auccuuuguuuc

SEQ ID NO: 1015 - RNA, 13 nt, Artificial Sequence
  Description of Artificial Sequence: Synthetic oligonucleotide
gucuaaguguuug

SEQ ID NO: 1016 - RNA, 11 nt, Artificial Sequence
  Description of Artificial Sequence: Synthetic oligonucleotide
ccugugacaaa

SEQ ID NO: 1017 - RNA, 12 nt, Artificial Sequence
  Description of Artificial Sequence: Synthetic oligonucleotide
caggcugaauua

SEQ ID NO: 1018 - RNA, 13 nt, Artificial Sequence
  Description of Artificial Sequence: Synthetic oligonucleotide
ucauucuuacaau

SEQ ID NO: 1019 - RNA, 14 nt, Artificial Sequence
  Description of Artificial Sequence: Synthetic oligonucleotide
cauucuuacaauug

SEQ ID NO: 1020 - RNA, 11 nt, Artificial Sequence
  Description of Artificial Sequence: Synthetic oligonucleotide
agagaguguac

SEQ ID NO: 1021 - RNA, 11 nt, Artificial Sequence
  Description of Artificial Sequence: Synthetic oligonucleotide
gaacucagcag

SEQ ID NO: 1022 - RNA, 12 nt, Artificial Sequence
  Description of Artificial Sequence: Synthetic oligonucleotide
uuauuuucagua

SEQ ID NO: 1023 - RNA, 11 nt, Artificial Sequence
  Description of Artificial Sequence: Synthetic oligonucleotide
cuuaaauggaa

SEQ ID NO: 1024 - RNA, 12 nt, Artificial Sequence
  Description of Artificial Sequence: Synthetic oligonucleotide
gccuaaaauugu

SEQ ID NO: 1025 - RNA, 12 nt, Artificial Sequence
  Description of Artificial Sequence: Synthetic oligonucleotide
acuaacaucugg

SEQ ID NO: 1026 - RNA, 11 nt, Artificial Sequence
  Description of Artificial Sequence: Synthetic oligonucleotide
gacugugagcu

SEQ ID NO: 1027 - RNA, 13 nt, Artificial Sequence
  Description of Artificial Sequence: Synthetic oligonucleotide
gcuuuuuauuaau

SEQ ID NO: 1028 - RNA, 12 nt, Artificial Sequence
  Description of Artificial Sequence: Synthetic oligonucleotide
ucuucuuacauu

SEQ ID NO: 1029 - RNA, 14 nt, Artificial Sequence
  Description of Artificial Sequence: Synthetic oligonucleotide
auuuguaaaaaugu

SEQ ID NO: 1030 - RNA, 14 nt, Artificial Sequence
  Description of Artificial Sequence: Synthetic oligonucleotide
ucuuaauucauauu

SEQ ID NO: 1031 - RNA, 12 nt, Artificial Sequence
  Description of Artificial Sequence: Synthetic oligonucleotide
aacuaaucauga

SEQ ID NO: 1032 - RNA, 11 nt, Artificial Sequence
  Description of Artificial Sequence: Synthetic oligonucleotide
cugcucuuggg

SEQ ID NO: 1033 - RNA, 12 nt, Artificial Sequence
  Description of Artificial Sequence: Synthetic oligonucleotide
aguagcuuugag

SEQ ID NO: 1034 - RNA, 13 nt, Artificial Sequence
  Description of Artificial Sequence: Synthetic oligonucleotide
acguaauauuuca

SEQ ID NO: 1035 - RNA, 12 nt, Artificial Sequence
  Description of Artificial Sequence: Synthetic oligonucleotide
auucucuucacu

SEQ ID NO: 1036 - RNA, 13 nt, Artificial Sequence
  Description of Artificial Sequence: Synthetic oligonucleotide
uaaugcuaagaaa

SEQ ID NO: 1037 - RNA, 11 nt, Artificial Sequence
  Description of Artificial Sequence: Synthetic oligonucleotide
cugaaaaucaa

SEQ ID NO: 1038 - RNA, 13 nt, Artificial Sequence
  Description of Artificial Sequence: Synthetic oligonucleotide
auaugauuacuuu

SEQ ID NO: 1039 - RNA, 13 nt, Artificial Sequence
  Description of Artificial Sequence: Synthetic oligonucleotide
auuuuguucuaca

SEQ ID NO: 1040 - RNA, 11 nt, Artificial Sequence
  Description of Artificial Sequence: Synthetic oligonucleotide
ccgggacucuc

SEQ ID NO: 1041 - RNA, 13 nt, Artificial Sequence
  Description of Artificial Sequence: Synthetic oligonucleotide
cuuuaaaguaaag

SEQ ID NO: 1042 - RNA, 12 nt, Artificial Sequence
  Description of Artificial Sequence: Synthetic oligonucleotide
cuggaagccugg

SEQ ID NO: 1043 - RNA, 13 nt, Artificial Sequence
  Description of Artificial Sequence: Synthetic oligonucleotide
aaacaaaagagag

SEQ ID NO: 1044 - RNA, 12 nt, Artificial Sequence
  Description of Artificial Sequence: Synthetic oligonucleotide
ucaguuaugccg

SEQ ID NO: 1045 - RNA, 12 nt, Artificial Sequence
  Description of Artificial Sequence: Synthetic oligonucleotide
aaaagaagucca

SEQ ID NO: 1046 - RNA, 10 nt, Artificial Sequence
  Description of Artificial Sequence: Synthetic oligonucleotide
ggugagguua

SEQ ID NO: 1047 - RNA, 10 nt, Artificial Sequence
  Description of Artificial Sequence: Synthetic oligonucleotide
ggaagaggac

SEQ ID NO: 1048 - RNA, 12 nt, Artificial Sequence
  Description of Artificial Sequence: Synthetic oligonucleotide
agcaaguauugu

SEQ ID NO: 1049 - RNA, 11 nt, Artificial Sequence
  Description of Artificial Sequence: Synthetic oligonucleotide
uuguagcacuc

SEQ ID NO: 1050 - RNA, 13 nt, Artificial Sequence
  Description of Artificial Sequence: Synthetic oligonucleotide
caaaaccacaaau

SEQ ID NO: 1051 - RNA, 11 nt, Artificial Sequence
  Description of Artificial Sequence: Synthetic oligonucleotide
aagcccauaca

SEQ ID NO: 1052 - RNA, 10 nt, Artificial Sequence
  Description of Artificial Sequence: Synthetic oligonucleotide
gcccauacag

SEQ ID NO: 1053 - RNA, 11 nt, Artificial Sequence
  Description of Artificial Sequence: Synthetic oligonucleotide
agaaaccuucc

SEQ ID NO: 1054 - RNA, 9 nt, Artificial Sequence
  Description of Artificial Sequence: Synthetic oligonucleotide
uauaccuac

SEQ ID NO: 1055 - RNA, 12 nt, Artificial Sequence
  Description of Artificial Sequence: Synthetic oligonucleotide
ccaguuuucgga

SEQ ID NO: 1056 - RNA, 8 nt, Artificial Sequence
  Description of Artificial Sequence: Synthetic oligonucleotide
gaacaggg

SEQ ID NO: 1057 - RNA, 12 nt, Artificial Sequence
  Description of Artificial Sequence: Synthetic oligonucleotide
uaacuuuccagu

SEQ ID NO: 1058 - RNA, 13 nt, Artificial Sequence
  Description of Artificial Sequence: Synthetic oligonucleotide
aaguuugguuuug

SEQ ID NO: 1059 - RNA, 11 nt, Artificial Sequence
  Description of Artificial Sequence: Synthetic oligonucleotide
uucccacugua

SEQ ID NO: 1060 - RNA, 12 nt, Artificial Sequence
  Description of Artificial Sequence: Synthetic oligonucleotide
gauaccauauga

SEQ ID NO: 1061 - RNA, 10 nt, Artificial Sequence
  Description of Artificial Sequence: Synthetic oligonucleotide
acaugggcug

SEQ ID NO: 1062 - RNA, 12 nt, Artificial Sequence
  Description of Artificial Sequence: Synthetic oligonucleotide
aacuuuuucaua

SEQ ID NO: 1063 - RNA, 11 nt, Artificial Sequence
  Description of Artificial Sequence: Synthetic oligonucleotide
augaggccgga

SEQ ID NO: 1064 - RNA, 10 nt, Artificial Sequence
  Description of Artificial Sequence: Synthetic oligonucleotide
cugcauuugu

SEQ ID NO: 1065 - RNA, 12 nt, Artificial Sequence
  Description of Artificial Sequence: Synthetic oligonucleotide
auguuuacuacc

SEQ ID NO: 1066 - RNA, 14 nt, Artificial Sequence
  Description of Artificial Sequence: Synthetic oligonucleotide
auuuuuugaugaaa

SEQ ID NO: 1067 - RNA, 13 nt, Artificial Sequence
  Description of Artificial Sequence: Synthetic oligonucleotide
agugugugaauuu

SEQ ID NO: 1068 - RNA, 12 nt, Artificial Sequence
  Description of Artificial Sequence: Synthetic oligonucleotide
agcaauguaugu

SEQ ID NO: 1069 - RNA, 13 nt, Artificial Sequence
  Description of Artificial Sequence: Synthetic oligonucleotide
aagcacauauaua

SEQ ID NO: 1070 - RNA, 13 nt, Artificial Sequence
  Description of Artificial Sequence: Synthetic oligonucleotide
uaauaguuucucc

SEQ ID NO: 1071 - RNA, 12 nt, Artificial Sequence
  Description of Artificial Sequence: Synthetic oligonucleotide
guuucuccaaau

SEQ ID NO: 1072 - RNA, 12 nt, Artificial Sequence
  Description of Artificial Sequence: Synthetic oligonucleotide
acuuccuagaaa

SEQ ID NO: 1073 - RNA, 12 nt, Artificial Sequence
  Description of Artificial Sequence: Synthetic oligonucleotide
acaccauauaug

SEQ ID NO: 1074 - RNA, 13 nt, Artificial Sequence
  Description of Artificial Sequence: Synthetic oligonucleotide
uauaugaauggag

SEQ ID NO: 1075 - RNA, 12 nt, Artificial Sequence
  Description of Artificial Sequence: Synthetic oligonucleotide
cauuuacaggga

SEQ ID NO: 1076 - RNA, 12 nt, Artificial Sequence
  Description of Artificial Sequence: Synthetic oligonucleotide
auuuacagggac

SEQ ID NO: 1077 - RNA, 9 nt, Artificial Sequence
  Description of Artificial Sequence: Synthetic oligonucleotide
gggaccuga

SEQ ID NO: 1078 - RNA, 13 nt, Artificial Sequence
  Description of Artificial Sequence: Synthetic oligonucleotide
guuugacugcauc

SEQ ID NO: 1079 - RNA, 12 nt, Artificial Sequence
  Description of Artificial Sequence: Synthetic oligonucleotide
uugacugcaucg

SEQ ID NO: 1080 - RNA, 11 nt, Artificial Sequence
  Description of Artificial Sequence: Synthetic oligonucleotide
aguucacaggg

SEQ ID NO: 1081 - RNA, 12 nt, Artificial Sequence
  Description of Artificial Sequence: Synthetic oligonucleotide
gcaccucugucc

SEQ ID NO: 1082 - RNA, 14 nt, Artificial Sequence
  Description of Artificial Sequence: Synthetic oligonucleotide
guuugucuuuuuaa

SEQ ID NO: 1083 - RNA, 13 nt, Artificial Sequence
  Description of Artificial Sequence: Synthetic oligonucleotide
uugucuuuuuaag

SEQ ID NO: 1084 - RNA, 12 nt, Artificial Sequence
  Description of Artificial Sequence: Synthetic oligonucleotide
cuaaagguuguc

SEQ ID NO: 1085 - RNA, 11 nt, Artificial Sequence
  Description of Artificial Sequence: Synthetic oligonucleotide
agguugucgac

SEQ ID NO: 1086 - RNA, 12 nt, Artificial Sequence
  Description of Artificial Sequence: Synthetic oligonucleotide
ccuggcaauugu

SEQ ID NO: 1087 - RNA, 11 nt, Artificial Sequence
  Description of Artificial Sequence: Synthetic oligonucleotide
guggugcgagg

SEQ ID NO: 1088 - RNA, 12 nt, Artificial Sequence
  Description of Artificial Sequence: Synthetic oligonucleotide
gagacaugaaau

SEQ ID NO: 1089 - RNA, 12 nt, Artificial Sequence
  Description of Artificial Sequence: Synthetic oligonucleotide
uauauuucucca

SEQ ID NO: 1090 - RNA, 9 nt, Artificial Sequence
  Description of Artificial Sequence: Synthetic oligonucleotide
augaaggcu

SEQ ID NO: 1091 - RNA, 10 nt, Artificial Sequence
  Description of Artificial Sequence: Synthetic oligonucleotide
cuggaguggu

SEQ ID NO: 1092 - RNA, 10 nt, Artificial Sequence
  Description of Artificial Sequence: Synthetic oligonucleotide
ggaagagagg

SEQ ID NO: 1093 - RNA, 11 nt, Artificial Sequence
  Description of Artificial Sequence: Synthetic oligonucleotide
uugcaucgggc

SEQ ID NO: 1094 - RNA, 12 nt, Artificial Sequence
  Description of Artificial Sequence: Synthetic oligonucleotide
uauccuacugug

SEQ ID NO: 1095 - RNA, 12 nt, Artificial Sequence
  Description of Artificial Sequence: Synthetic oligonucleotide
ccuacuguguaa

SEQ ID NO: 1096 - RNA, 11 nt, Artificial Sequence
  Description of Artificial Sequence: Synthetic oligonucleotide
cuuguagugua

SEQ ID NO: 1097 - RNA, 12 nt, Artificial Sequence
  Description of Artificial Sequence: Synthetic oligonucleotide
cuuuguugauug

SEQ ID NO: 1098 - RNA, 13 nt, Artificial Sequence
  Description of Artificial Sequence: Synthetic oligonucleotide
uuguugauugaaa

SEQ ID NO: 1099 - RNA, 14 nt, Artificial Sequence
  Description of Artificial Sequence: Synthetic oligonucleotide
ucuuuuucuuccau

SEQ ID NO: 1100 - RNA, 12 nt, Artificial Sequence
  Description of Artificial Sequence: Synthetic oligonucleotide
aucuuccuucua

SEQ ID NO: 1101 - RNA, 12 nt, Artificial Sequence
  Description of Artificial Sequence: Synthetic oligonucleotide
ugaaugcuucau

SEQ ID NO: 1102 - RNA, 12 nt, Artificial Sequence
  Description of Artificial Sequence: Synthetic oligonucleotide
gaaugcuucaug

SEQ ID NO: 1103 - RNA, 12 nt, Artificial Sequence
  Description of Artificial Sequence: Synthetic oligonucleotide
auucuacuuuga

SEQ ID NO: 1104 - RNA, 12 nt, Artificial Sequence
  Description of Artificial Sequence: Synthetic oligonucleotide
gcaacuacagac

SEQ ID NO: 1105 - RNA, 12 nt, Artificial Sequence
  Description of Artificial Sequence: Synthetic oligonucleotide
accaaggucaac

SEQ ID NO: 1106 - RNA, 12 nt, Artificial Sequence
  Description of Artificial Sequence: Synthetic oligonucleotide
gacuaucucgac

SEQ ID NO: 1107 - RNA, 12 nt, Artificial Sequence
  Description of Artificial Sequence: Synthetic oligonucleotide
accuucccaaac

SEQ ID NO: 1108 - RNA, 13 nt, Artificial Sequence
  Description of Artificial Sequence: Synthetic oligonucleotide
caagcuuagaacu

SEQ ID NO: 1109 - RNA, 14 nt, Artificial Sequence
  Description of Artificial Sequence: Synthetic oligonucleotide
gcuuagaacuuuaa

SEQ ID NO: 1110 - RNA, 13 nt, Artificial Sequence
  Description of Artificial Sequence: Synthetic oligonucleotide
aacuuuaagcaac

SEQ ID NO: 1111 - RNA, 10 nt, Artificial Sequence
  Description of Artificial Sequence: Synthetic oligonucleotide
agaccaccac

SEQ ID NO: 1112 - RNA, 13 nt, Artificial Sequence
  Description of Artificial Sequence: Synthetic oligonucleotide
cgagaaauaaagu

SEQ ID NO: 1113 - RNA, 13 nt, Artificial Sequence
  Description of Artificial Sequence: Synthetic oligonucleotide
gagaaauaaaguu

SEQ ID NO: 1114 - RNA, 11 nt, Artificial Sequence
  Description of Artificial Sequence: Synthetic oligonucleotide
ggaaaugaucc

SEQ ID NO: 1115 - RNA, 12 nt, Artificial Sequence
  Description of Artificial Sequence: Synthetic oligonucleotide
aagaaaugaaac

SEQ ID NO: 1116 - RNA, 12 nt, Artificial Sequence
  Description of Artificial Sequence: Synthetic oligonucleotide
uuuccauccucc

SEQ ID NO: 1117 - RNA, 14 nt, Artificial Sequence
  Description of Artificial Sequence: Synthetic oligonucleotide
cugaaaaucuuuga

SEQ ID NO: 1118 - RNA, 10 nt, Artificial Sequence
  Description of Artificial Sequence: Synthetic oligonucleotide
gccguucagg

SEQ ID NO: 1119 - RNA, 12 nt, Artificial Sequence
  Description of Artificial Sequence: Synthetic oligonucleotide
aggguccagaag

SEQ ID NO: 1120 - RNA, 12 nt, Artificial Sequence
  Description of Artificial Sequence: Synthetic oligonucleotide
caagacugcuug

SEQ ID NO: 1121 - RNA, 12 nt, Artificial Sequence
  Description of Artificial Sequence: Synthetic oligonucleotide
ccaugucuuugg

SEQ ID NO: 1122 - RNA, 10 nt, Artificial Sequence
  Description of Artificial Sequence: Synthetic oligonucleotide
ccugaaacac

SEQ ID NO: 1123 - RNA, 11 nt, Artificial Sequence
  Description of Artificial Sequence: Synthetic oligonucleotide
cucuguaccuc

SEQ ID NO: 1124 - RNA, 11 nt, Artificial Sequence
  Description of Artificial Sequence: Synthetic oligonucleotide
gcaagacaaga

SEQ ID NO: 1125 - RNA, 12 nt, Artificial Sequence
  Description of Artificial Sequence: Synthetic oligonucleotide
caagacaagaaa

SEQ ID NO: 1126 - RNA, 11 nt, Artificial Sequence
  Description of Artificial Sequence: Synthetic oligonucleotide
guacaagaucc

SEQ ID NO: 1127 - RNA, 11 nt, Artificial Sequence
  Description of Artificial Sequence: Synthetic oligonucleotide
guacuugcaga

SEQ ID NO: 1128 - RNA, 12 nt, Artificial Sequence
  Description of Artificial Sequence: Synthetic oligonucleotide
gaucgauacaga

SEQ ID NO: 1129 - RNA, 12 nt, Artificial Sequence
  Description of Artificial Sequence: Synthetic oligonucleotide
auaaaaauaaau

SEQ ID NO: 1130 - RNA, 12 nt, Artificial Sequence
  Description of Artificial Sequence: Synthetic oligonucleotide
aaaaauaaauau

SEQ ID NO: 1131 - RNA, 12 nt, Artificial Sequence
  Description of Artificial Sequence: Synthetic oligonucleotide
uugacugcugug

SEQ ID NO: 1132 - RNA, 12 nt, Artificial Sequence
  Description of Artificial Sequence: Synthetic oligonucleotide
gagaugagagac

SEQ ID NO: 1133 - RNA, 9 nt, Artificial Sequence
  Description of Artificial Sequence: Synthetic oligonucleotide
cccacuugg

SEQ ID NO: 1134 - RNA, 5616 nt, Homo sapiens
ccccggcgcagcgcggccgcagcagccuccgccccccgcacggugugagcgcccgacgcggccgaggcggccggagucccgagcuagccccggcggccgccgccgcccagaccggacgacaggccaccucgucggcguccgcccgaguccccgccucgccgccaacgccacaaccaccgcgcacggcccccugacuccguccaguauugaucgggagagccggagcgagcucuucggggagcagcgaugcgacccuccgggacggccggggcagcgcuccuggcgcugcuggcugcgcucugcccggcgagucgggcucuggaggaaaagaaaguuugccaaggcacgaguaacaagcucacgcaguugggcacuuuugaagaucauuuucucagccuccagaggauguucaauaacugugaggugguccuugggaauuuggaaauuaccuaugugcagaggaauuaugaucuuuccuucuuaaagaccauccaggagguggcugguuauguccucauugcccucaacacaguggagcgaauuccuuuggaaaaccugcagaucaucagaggaaauauguacuacgaaaauuccuaugccuuagcagucuuaucuaacuaugaugcaaauaaaaccggacugaaggagcugcccaugagaaauuuacaggaaauccugcauggcgccgugcgguucagcaacaacccugcccugugcaacguggagagcauccaguggcgggacauagucagcagugacuuucucagcaacaugucgauggacuuccagaaccaccugggcagcugccaaaagugugauccaagcugucccaaugggagcugcuggggugcaggagaggagaacugccagaaacugaccaaaaucaucugugcccagcagugcuccgggcgcugccguggcaagucccccagugacugcugccacaaccagugugcugcaggcugcacaggcccccgggagagcgacugccuggucugccgcaaauuccgagacgaagccacgugcaaggacaccugccccccacucaugcucuacaaccccaccacguaccagauggaugugaaccccgagggcaaauacagcuuuggugccaccugcgugaagaaguguccccguaauuauguggugacagaucacggcucgugcguccgagccuguggggccgacagcuaugagauggaggaagacggcguccgcaaguguaagaagugcgaagggccuugccgcaaaguguguaacggaauagguauuggugaauuuaaagacucacucuccauaaaugcuacgaauauuaaacacuucaaaaacugcaccuccaucaguggcgaucuccacauccugccgguggcauuuaggggugacuccuucacacauacuccuccucuggauccacaggaacuggauauucugaaaaccguaaaggaaaucacaggguuuuugcugauucaggcuuggccugaaaacaggacggaccuccaugccuuugagaaccuagaaaucauacgcggcaggaccaagcaacauggucaguuuucucuugcagucgucagccugaacauaacauccuugggauuacgcucccucaaggagauaagugauggagaugugauaauuucaggaaacaaaaauuugugcuaugcaaauacaauaaacuggaaaaaacuguuugggaccuccggucagaaaaccaaaauuauaagcaacagaggugaaaacagcugcaaggccacaggccaggucugccaugccuugugcucccccgagggcugcuggggcccggagcccagggacugcgucucuugccggaaugucagccgaggcagggaaugcguggacaagugcaaccuucuggagggugagccaagggaguuuguggagaacucugagugcauacagugccacccagagugccugccucaggccaugaacaucaccugcacaggacggggaccagacaacuguauccagugugcccacuacauugacggcccccacugcgucaagaccugcccggcaggagucaugggagaaaacaacacccuggucuggaaguacgcagacgccggccaugugugccaccugugccauccaaacugcaccuacggaugcacugggccaggucuugaaggcuguccaacgaaugggccuaagaucccguccaucgccacugggauggugggggcccuccucuugcugcuggugguggcccuggggaucggccucuucaugcgaaggcgccacaucguucggaagcgcacgcugcggaggcugcugcaggagagggagcuuguggagccucuuacacccaguggagaagcucccaaccaagcucucuugaggaucuugaaggaaacugaauucaaaaagaucaaagugcugggcuccggugcguucggcacgguguauaagggacucuggaucccagaaggugagaaaguuaaaauucccgucgcuaucaaggaauuaagagaagcaacaucuccgaaagccaacaaggaaauccucgaugaagccuacgugauggccagcguggacaacccccacgugugccgccugcugggcaucugccucaccuccaccgugcagcucaucacgcagcucaugcccuucggcugccuccuggacuauguccgggaacacaaagacaauauuggcucccaguaccugcucaacuggugugugcagaucgcaaagggcaugaacuacuuggaggaccgucgcuuggugcaccgcgaccuggcagccaggaacguacuggugaaaacaccgcagcaugucaagaucacagauuuugggcuggccaaacugcugggugcggaagagaaagaauaccaugcagaaggaggcaaagugccuaucaaguggauggcauuggaaucaauuuuacacagaaucuauacccaccagagugaugucuggagcuacggggugaccguuugggaguugaugaccuuuggauccaagccauaugacggaaucccugccagcgagaucuccuccauccuggagaaaggagaacgccucccucagccacccauauguaccaucgaugucuacaugaucauggucaagugcuggaugauagacgcagauagucgcccaaaguuccgugaguugaucaucgaauucuccaaaauggcccgagacccccagcgcuaccuugucauucagggggaugaaagaaugcauuugccaaguccuacagacuccaacuucuaccgugcccugauggaugaagaagacauggacgacgugguggaugccgacgaguaccucaucccacagcagggcuucuucagcagccccuccacgucacggacuccccuccugagcucucugagugcaaccagcaacaauuccaccguggcuugcauugauagaaaugggcugcaaagcugucccaucaaggaagacagcuucuugcagcgauacagcucagaccccacaggcgccuugacugaggacagcauagacgacaccuuccucccagugccugaauacauaaaccaguccguucccaaaaggcccgcuggcucugugcagaauccugucuaucacaaucagccucugaaccccgcgcccagcagagacccacacuaccaggacccccacagcacugcagugggcaaccccgaguaucucaacacuguccagcccaccugugucaacagcacauucgacagcccugcccacugggcccagaaaggcagccaccaaauuagccuggacaacccugacuaccagcaggacuucuuucccaaggaagccaagccaaauggcaucuuuaagggcuccacagcugaaaaugcagaauaccuaagggucgcgccacaaagcagugaauuuauuggagcaugaccacggaggauaguaugagcccuaaaaauccagacucuuucgauacccaggaccaagccacagcagguccuccaucccaacagccaugcccgcauuagcucuuagacccacagacugguuuugcaacguuuacaccgacuagccaggaaguacuuccaccucgggcacauuuugggaaguugcauuccuuugucuucaaacugugaagcauuuacagaaacgcauccagcaagaauauugucccuuugagcagaaauuuaucuuucaaagagguauauuugaaaaaaaaaaaaaguauaugugaggauuuuuauugauuggggaucuuggaguuuuucauugucgcuauugauuuuuacuucaaugggcucuuccaacaaggaagaagcuugcugguagcacuugcuacccugaguucauccaggcccaacugugagcaaggagcacaagccacaagucuuccagaggaugcuugauuccagugguucugcuucaaggcuuccacugcaaaacacuaaagauccaagaaggccuucauggccccagcaggccggaucgguacuguaucaagucauggcagguacaguaggauaagccacucugucccuuccugggcaaagaagaaacggaggggauggaauucuuccuuagacuuacuuuuguaaaaauguccccacgguacuuacuccccacugauggaccagugguuuccagucaugagcguuagacugacuuguuugucuuccauuccauuguuuugaaacucaguaugcugccccugucuugcugucaugaaaucagcaagagaggaugacacaucaaauaauaacucggauuccagcccacauuggauucaucagcauuuggaccaauagcccacagcugagaauguggaauaccuaaggauagcaccgcuuuuguucucgcaaaaacguaucuccuaauuugaggcucagaugaaaugcaucagguccuuuggggcauagaucagaagacuacaaaaaugaagcugcucugaaaucuccuuuagccaucaccccaaccccccaaaauuaguuuguguuacuuauggaagauaguuuucuccuuuuacuucacuucaaaagcuuuuuacucaaagaguauauguucccuccaggucagcugcccccaaacccccuccuuacgcuuugucacacaaaaagugucucugccuugagucaucuauucaagcacuuacagcucuggccacaacagggcauuuuacaggugcgaaugacaguagcauuaugaguaguguggaauucagguaguaaauaugaaacuaggguuugaaauugauaaugcuuucacaacauuugcagauguuuuagaaggaaaaaaguuccuuccuaaaauaauuucucuacaauuggaagauuggaagauucagcuaguuaggagcccaccuuuuuuccuaaucugugugugcccuguaaccugacugguuaacagcaguccuuuguaaacaguguuuuaaacucuccuagucaauauccaccccauccaauuuaucaaggaagaaaugguucagaaaauauuuucagccuacaguuauguucagucacacacacauacaaaauguuccuuuugcuuuuaaaguaauuuuugacucccagaucagucagagccccuacagcauuguuaagaaaguauuugauuuuugucucaaugaaaauaaaacuauauucauuuccacucuaaaaaaaaaaaaaaaaa

SEQ ID NO: 1135 - RNA, 2239 nt, Homo sapiens
ccccggcgcagcgcggccgcagcagccuccgccccccgcacggugugagcgcccgacgcggccgaggcggccggagucccgagcuagccccggcggccgccgccgcccagaccggacgacaggccaccucgucggcguccgcccgaguccccgccucgccgccaacgccacaaccaccgcgcacggcccccugacuccguccaguauugaucgggagagccggagcgagcucuucggggagcagcgaugcgacccuccgggacggccggggcagcgcuccuggcgcugcuggcugcgcucugcccggcgagucgggcucuggaggaaaagaaaguuugccaaggcacgaguaacaagcucacgcaguugggcacuuuugaagaucauuuucucagccuccagaggauguucaauaacugugaggugguccuugggaauuuggaaauuaccuaugugcagaggaauuaugaucuuuccuucuuaaagaccauccaggagguggcugguuauguccucauugcccucaacacaguggagcgaauuccuuuggaaaaccugcagaucaucagaggaaauauguacuacgaaaauuccuaugccuuagcagucuuaucuaacuaugaugcaaauaaaaccggacugaaggagcugcccaugagaaauuuacaggaaauccugcauggcgccgugcgguucagcaacaacccugcccugugcaacguggagagcauccaguggcgggacauagucagcagugacuuucucagcaacaugucgauggacuuccagaaccaccugggcagcugccaaaagugugauccaagcugucccaaugggagcugcuggggugcaggagaggagaacugccagaaacugaccaaaaucaucugugcccagcagugcuccgggcgcugccguggcaagucccccagugacugcugccacaaccagugugcugcaggcugcacaggcccccgggagagcgacugccuggucugccgcaaauuccgagacgaagccacgugcaaggacaccugccccccacucaugcucuacaaccccaccacguaccagauggaugugaaccccgagggcaaauacagcuuuggugccaccugcgugaagaaguguccccguaauuauguggugacagaucacggcucgugcguccgagccuguggggccgacagcuaugagauggaggaagacggcguccgcaaguguaagaagugcgaagggccuugccgcaaaguguguaacggaauagguauuggugaauuuaaagacucacucuccauaaaugcuacgaauauuaaacacuucaaaaacugcaccuccaucaguggcgaucuccacauccugccgguggcauuuaggggugacuccuucacacauacuccuccucuggauccacaggaacuggauauucugaaaaccguaaaggaaaucacaggguuuuugcugauucaggcuuggccugaaaacaggacggaccuccaugccuuugagaaccuagaaaucauacgcggcaggaccaagcaacauggucaguuuucucuugcagucgucagccugaacauaacauccuugggauuacgcucccucaaggagauaagugauggagaugugauaauuucaggaaacaaaaauuugugcuaugcaaauacaauaaacuggaaaaaacuguuugggaccuccggucagaaaaccaaaauuauaagcaacagaggugaaaacagcugcaaggccacaggccaggucugccaugccuugugcucccccgagggcugcuggggcccggagcccagggacugcgucucuugccggaaugucagccgaggcagggaaugcguggacaagugcaaccuucuggagggugagccaagggaguuuguggagaacucugagugcauacagugccacccagagugccugccucaggccaugaacaucaccugcacaggacggggaccagacaacuguauccagugugcccacuacauugacggcccccacugcgucaagaccugcccggcaggagucaugggagaaaacaacacccuggucuggaaguacgcagacgccggccaugugugccaccugugccauccaaacugcaccuacggguccuaauaaaucuucacugucugacuuuagucucccacuaaaacugcauuuccuuucuacaauuucaauuucucccuuugcuucaaauaaaguccugacacuauucauuuga

SEQ ID NO: 1136 - RNA, 1595 nt, Homo sapiens
ccccggcgcagcgcggccgcagcagccuccgccccccgcacggugugagcgcccgacgcggccgaggcggccggagucccgagcuagccccggcggccgccgccgcccagaccggacgacaggccaccucgucggcguccgcccgaguccccgccucgccgccaacgccacaaccaccgcgcacggcccccugacuccguccaguauugaucgggagagccggagcgagcucuucggggagcagcgaugcgacccuccgggacggccggggcagcgcuccuggcgcugcuggcugcgcucugcccggcgagucgggcucuggaggaaaagaaaguuugccaaggcacgaguaacaagcucacgcaguugggcacuuuugaagaucauuuucucagccuccagaggauguucaauaacugugaggugguccuugggaauuuggaaauuaccuaugugcagaggaauuaugaucuuuccuucuuaaagaccauccaggagguggcugguuauguccucauugcccucaacacaguggagcgaauuccuuuggaaaaccugcagaucaucagaggaaauauguacuacgaaaauuccuaugccuuagcagucuuaucuaacuaugaugcaaauaaaaccggacugaaggagcugcccaugagaaauuuacaggaaauccugcauggcgccgugcgguucagcaacaacccugcccugugcaacguggagagcauccaguggcgggacauagucagcagugacuuucucagcaacaugucgauggacuuccagaaccaccugggcagcugccaaaagugugauccaagcugucccaaugggagcugcuggggugcaggagaggagaacugccagaaacugaccaaaaucaucugugcccagcagugcuccgggcgcugccguggcaagucccccagugacugcugccacaaccagugugcugcaggcugcacaggcccccgggagagcgacugccuggucugccgcaaauuccgagacgaagccacgugcaaggacaccugccccccacucaugcucuacaaccccaccacguaccagauggaugugaaccccgagggcaaauacagcuuuggugccaccugcgugaagaaguguccccguaauuauguggugacagaucacggcucgugcguccgagccuguggggccgacagcuaugagauggaggaagacggcguccgcaaguguaagaagugcgaagggccuugccgcaaaguguguaacggaauagguauuggugaauuuaaagacucacucuccauaaaugcuacgaauauuaaacacuucaaaaacugcaccuccaucaguggcgaucuccacauccugccgguggcauuuaggggugacuccuucacacauacuccuccucuggauccacaggaacuggauauucugaaaaccguaaaggaaaucacagguuugagcugaauuaucacaugaauauaaaugggaaaucaguguuuuagagagagaacuuuucgacauauuuccuguucccuuggaauaaaaacauuucuucugaaauuuuaccguuaaaaaaaaaaaaaaaaaaaaaaaaa

SEQ ID NO: 1137 - RNA, 2865 nt, Homo sapiens
ccccggcgcagcgcggccgcagcagccuccgccccccgcacggugugagcgcccgacgcggccgaggcggccggagucccgagcuagccccggcggccgccgccgcccagaccggacgacaggccaccucgucggcguccgcccgaguccccgccucgccgccaacgccacaaccaccgcgcacggcccccugacuccguccaguauugaucgggagagccggagcgagcucuucggggagcagcgaugcgacccuccgggacggccggggcagcgcuccuggcgcugcuggcugcgcucugcccggcgagucgggcucuggaggaaaagaaaguuugccaaggcacgaguaacaagcucacgcaguugggcacuuuugaagaucauuuucucagccuccagaggauguucaauaacugugaggugguccuugggaauuuggaaauuaccuaugugcagaggaauuaugaucuuuccuucuuaaagaccauccaggagguggcugguuauguccucauugcccucaacacaguggagcgaauuccuuuggaaaaccugcagaucaucagaggaaauauguacuacgaaaauuccuaugccuuagcagucuuaucuaacuaugaugcaaauaaaaccggacugaaggagcugcccaugagaaauuuacaggaaauccugcauggcgccgugcgguucagcaacaacccugcccugugcaacguggagagcauccaguggcgggacauagucagcagugacuuucucagcaacaugucgauggacuuccagaaccaccugggcagcugccaaaagugugauccaagcugucccaaugggagcugcuggggugcaggagaggagaacugccagaaacugaccaaaaucaucugugcccagcagugcuccgggcgcugccguggcaagucccccagugacugcugccacaaccagugugcugcaggcugcacaggcccccgggagagcgacugccuggucugccgcaaauuccgagacgaagccacgugcaaggacaccugccccccacucaugcucuacaaccccaccacguaccagauggaugugaaccccgagggcaaauacagcuuuggugccaccugcgugaagaaguguccccguaauuauguggugacagaucacggcucgugcguccgagccuguggggccgacagcuaugagauggaggaagacggcguccgcaaguguaagaagugcgaagggccuugccgcaaaguguguaacggaauagguauuggugaauuuaaagacucacucuccauaaaugcuacgaauauuaaacacuucaaaaacugcaccuccaucaguggcgaucuccacauccugccgguggcauuuaggggugacuccuucacacauacuccuccucuggauccacaggaacuggauauucugaaaaccguaaaggaaaucacaggguuuuugcugauucaggcuuggccugaaaacaggacggaccuccaugccuuugagaaccuagaaaucauacgcggcaggaccaagcaacauggucaguuuucucuugcagucgucagccugaacauaacauccuugggauuacgcucccucaaggagauaagugauggagaugugauaauuucaggaaacaaaaauuugugcuaugcaaauacaauaaacuggaaaaaacuguuugggaccuccggucagaaaaccaaaauuauaagcaacagaggugaaaacagcugcaaggccacaggccaggucugccaugccuugugcucccccgagggcugcuggggcccggagcccagggacugcgucucuugccggaaugucagccgaggcagggaaugcguggacaagugcaaccuucuggagggugagccaagggaguuuguggagaacucugagugcauacagugccacccagagugccugccucaggccaugaacaucaccugcacaggacggggaccagacaacuguauccagugugcccacuacauugacggcccccacugcgucaagaccugcccggcaggagucaugggagaaaacaacacccuggucuggaaguacgcagacgccggccaugugugccaccugugccauccaaacugcaccuacgggccaggaaaugagagucucaaagccauguuauucugccuuuuuaaacuaucauccuguaaucaaaguaaugauggcagcgugucccaccagagcgggagcccagcugcucaggagucaugcuuaggauggaucccuucucuucugccgucagaguuucagcuggguugggguggaugcagccaccuccaugccuggccuucugcaucugugaucaucacggccuccuccugccacugagccucaugccuucacgugucuguuccccccgcuuuuccuuucugccaccccugcacgugggccgccagguucccaagaguauccuacccauuuccuuccuuccacucccuuugccagugccucucaccccaacuaguagcuaaccaucacccccaggacugaccucuuccuccucgcugccagaugauuguucaaagcacagaauuugucagaaaccugcagggacuccaugcugccagccuucuccguaauuagcauggccccaguccaugcuucuagccuugguuccuucugccccucuguuugaaauucuagagccagcugugggacaauuaucugugucaaaagccagaugugaaaacaucucaauaacaaacuggcugcuuuguucaaugcuagaacaacgccugucacagaguagaaacucaaaaauauuugcugagugaaugaacaaaugaauaaaugcauaauaaauaauuaaccaccaauccaacauccaga

SEQ ID NO: 1138 - RNA, 19 nt, Artificial Sequence
  Description of Artificial Sequence: Synthetic oligonucleotide
ccccggcgcagcgcggccg

SEQ ID NO: 1139 - RNA, 19 nt, Artificial Sequence
  Description of Artificial Sequence: Synthetic oligonucleotide
gcagcagccuccgcccccc

SEQ ID NO: 1140 - RNA, 19 nt, Artificial Sequence
  Description of Artificial Sequence: Synthetic oligonucleotide
cgcacggugugagcgcccg

SEQ ID NO: 1141 - RNA, 19 nt, Artificial Sequence
  Description of Artificial Sequence: Synthetic oligonucleotide
gacgcggccgaggcggccg

SEQ ID NO: 1142 - RNA, 19 nt, Artificial Sequence
  Description of Artificial Sequence: Synthetic oligonucleotide
ggagucccgagcuagcccc

SEQ ID NO: 1143 - RNA, 19 nt, Artificial Sequence
  Description of Artificial Sequence: Synthetic oligonucleotide
cggcggccgccgccgccca

SEQ ID NO: 1144 - RNA, 19 nt, Artificial Sequence
  Description of Artificial Sequence: Synthetic oligonucleotide
agaccggacgacaggccac

SEQ ID NO: 1145 - RNA, 19 nt, Artificial Sequence
  Description of Artificial Sequence: Synthetic oligonucleotide
ccucgucggcguccgcccg

SEQ ID NO: 1146 - RNA, 19 nt, Artificial Sequence
  Description of Artificial Sequence: Synthetic oligonucleotide
gaguccccgccucgccgcc

SEQ ID NO: 1147 - RNA, 19 nt, Artificial Sequence
  Description of Artificial Sequence: Synthetic oligonucleotide
caacgccacaaccaccgcg

SEQ ID NO: 1148 - RNA, 19 nt, Artificial Sequence
  Description of Artificial Sequence: Synthetic oligonucleotide
gcacggcccccugacuccg

SEQ ID NO: 1149 - RNA, 19 nt, Artificial Sequence
  Description of Artificial Sequence: Synthetic oligonucleotide
guccaguauugaucgggag

SEQ ID NO: 1150 - RNA, 19 nt, Artificial Sequence
  Description of Artificial Sequence: Synthetic oligonucleotide
gagccggagcgagcucuuc

SEQ ID NO: 1151 - RNA, 19 nt, Artificial Sequence
  Description of Artificial Sequence: Synthetic oligonucleotide
cggggagcagcgaugcgac

SEQ ID NO: 1152 - RNA, 19 nt, Artificial Sequence
  Description of Artificial Sequence: Synthetic oligonucleotide
cccuccgggacggccgggg

SEQ ID NO: 1153 - RNA, 19 nt, Artificial Sequence
  Description of Artificial Sequence: Synthetic oligonucleotide
gcagcgcuccuggcgcugc

SEQ ID NO: 1154 - RNA, 19 nt, Artificial Sequence
  Description of Artificial Sequence: Synthetic oligonucleotide
cuggcugcgcucugcccgg

SEQ ID NO: 1155 - RNA, 19 nt, Artificial Sequence
  Description of Artificial Sequence: Synthetic oligonucleotide
gcgagucgggcucuggagg

SEQ ID NO: 1156 - RNA, 19 nt, Artificial Sequence
  Description of Artificial Sequence: Synthetic oligonucleotide
gaaaagaaaguuugccaag

SEQ ID NO: 1157 - RNA, 19 nt, Artificial Sequence
  Description of Artificial Sequence: Synthetic oligonucleotide
ggcacgaguaacaagcuca

SEQ ID NO: 1158 - RNA, 19 nt, Artificial Sequence
  Description of Artificial Sequence: Synthetic oligonucleotide
acgcaguugggcacuuuug

SEQ ID NO: 1159 - RNA, 19 nt, Artificial Sequence
  Description of Artificial Sequence: Synthetic oligonucleotide
gaagaucauuuucucagcc

SEQ ID NO: 1160 - RNA, 19 nt, Artificial Sequence
  Description of Artificial Sequence: Synthetic oligonucleotide
cuccagaggauguucaaua

SEQ ID NO: 1161 - RNA, 19 nt, Artificial Sequence
  Description of Artificial Sequence: Synthetic oligonucleotide
aacugugaggugguccuug

SEQ ID NO: 1162 - RNA, 19 nt, Artificial Sequence
  Description of Artificial Sequence: Synthetic oligonucleotide
gggaauuuggaaauuaccu

SEQ ID NO: 1163 - RNA, 19 nt, Artificial Sequence
  Description of Artificial Sequence: Synthetic oligonucleotide
uaugugcagaggaauuaug

SEQ ID NO: 1164 - RNA, 19 nt, Artificial Sequence
  Description of Artificial Sequence: Synthetic oligonucleotide
gaucuuuccuucuuaaaga

SEQ ID NO: 1165 - RNA, 19 nt, Artificial Sequence
  Description of Artificial Sequence: Synthetic oligonucleotide
accauccaggagguggcug

SEQ ID NO: 1166 - RNA, 19 nt, Artificial Sequence
  Description of Artificial Sequence: Synthetic oligonucleotide
gguuauguccucauugccc

SEQ ID NO: 1167 - RNA, 19 nt, Artificial Sequence
  Description of Artificial Sequence: Synthetic oligonucleotide
cucaacacaguggagcgaa

SEQ ID NO: 1168 - RNA, 19 nt, Artificial Sequence
  Description of Artificial Sequence: Synthetic oligonucleotide
auuccuuuggaaaaccugc

SEQ ID NO: 1169 - RNA, 19 nt, Artificial Sequence
  Description of Artificial Sequence: Synthetic oligonucleotide
cagaucaucagaggaaaua

SEQ ID NO: 1170 - RNA, 19 nt, Artificial Sequence
  Description of Artificial Sequence: Synthetic oligonucleotide
auguacuacgaaaauuccu

SEQ ID NO: 1171 - RNA, 19 nt, Artificial Sequence
  Description of Artificial Sequence: Synthetic oligonucleotide
uaugccuuagcagucuuau

SEQ ID NO: 1172 - RNA, 19 nt, Artificial Sequence
  Description of Artificial Sequence: Synthetic oligonucleotide
ucuaacuaugaugcaaaua

SEQ ID NO: 1173 - RNA, 19 nt, Artificial Sequence
  Description of Artificial Sequence: Synthetic oligonucleotide
aaaaccggacugaaggagc

SEQ ID NO: 1174 - RNA, 19 nt, Artificial Sequence
  Description of Artificial Sequence: Synthetic oligonucleotide
cugcccaugagaaauuuac

SEQ ID NO: 1175 - RNA, 19 nt, Artificial Sequence
  Description of Artificial Sequence: Synthetic oligonucleotide
caggaaauccugcauggcg

SEQ ID NO: 1176 - RNA, 19 nt, Artificial Sequence
  Description of Artificial Sequence: Synthetic oligonucleotide
gccgugcgguucagcaaca

SEQ ID NO: 1177 - RNA, 19 nt, Artificial Sequence
  Description of Artificial Sequence: Synthetic oligonucleotide
aacccugcccugugcaacg

SEQ ID NO: 1178 - RNA, 19 nt, Artificial Sequence
  Description of Artificial Sequence: Synthetic oligonucleotide
guggagagcauccaguggc

SEQ ID NO: 1179 - RNA, 19 nt, Artificial Sequence
  Description of Artificial Sequence: Synthetic oligonucleotide
cgggacauagucagcagug

SEQ ID NO: 1180 - RNA, 19 nt, Artificial Sequence
  Description of Artificial Sequence: Synthetic oligonucleotide
gacuuucucagcaacaugu

SEQ ID NO: 1181 - RNA, 19 nt, Artificial Sequence
  Description of Artificial Sequence: Synthetic oligonucleotide
ucgauggacuuccagaacc

SEQ ID NO: 1182 - RNA, 19 nt, Artificial Sequence
  Description of Artificial Sequence: Synthetic oligonucleotide
caccugggcagcugccaaa

SEQ ID NO: 1183 - RNA, 19 nt, Artificial Sequence
  Description of Artificial Sequence: Synthetic oligonucleotide
aagugugauccaagcuguc

SEQ ID NO: 1184 - RNA, 19 nt, Artificial Sequence
  Description of Artificial Sequence: Synthetic oligonucleotide
cccaaugggagcugcuggg

SEQ ID NO: 1185 - RNA, 19 nt, Artificial Sequence
  Description of Artificial Sequence: Synthetic oligonucleotide
ggugcaggagaggagaacu

SEQ ID NO: 1186 - RNA, 19 nt, Artificial Sequence
  Description of Artificial Sequence: Synthetic oligonucleotide
ugccagaaacugaccaaaa

SEQ ID NO: 1187 - RNA, 19 nt, Artificial Sequence
  Description of Artificial Sequence: Synthetic oligonucleotide
aucaucugugcccagcagu

SEQ ID NO: 1188 - RNA, 19 nt, Artificial Sequence
  Description of Artificial Sequence: Synthetic oligonucleotide
ugcuccgggcgcugccgug

SEQ ID NO: 1189 - RNA, 19 nt, Artificial Sequence
  Description of Artificial Sequence: Synthetic oligonucleotide
ggcaagucccccagugacu

SEQ ID NO: 1190 - RNA, 19 nt, Artificial Sequence
  Description of Artificial Sequence: Synthetic oligonucleotide
ugcugccacaaccagugug

SEQ ID NO: 1191 - RNA, 19 nt, Artificial Sequence
  Description of Artificial Sequence: Synthetic oligonucleotide
gcugcaggcugcacaggcc

SEQ ID NO: 1192 - RNA, 19 nt, Artificial Sequence
  Description of Artificial Sequence: Synthetic oligonucleotide
ccccgggagagcgacugcc

SEQ ID NO: 1193 - RNA, 19 nt, Artificial Sequence
  Description of Artificial Sequence: Synthetic oligonucleotide
cuggucugccgcaaauucc

SEQ ID NO: 1194 - RNA, 19 nt, Artificial Sequence
  Description of Artificial Sequence: Synthetic oligonucleotide
cgagacgaagccacgugca

SEQ ID NO: 1195 - RNA, 19 nt, Artificial Sequence
  Description of Artificial Sequence: Synthetic oligonucleotide
aaggacaccugccccccac

SEQ ID NO: 1196 - RNA, 19 nt, Artificial Sequence
  Description of Artificial Sequence: Synthetic oligonucleotide
cucaugcucuacaacccca

SEQ ID NO: 1197 - RNA, 19 nt, Artificial Sequence
  Description of Artificial Sequence: Synthetic oligonucleotide
accacguaccagauggaug

SEQ ID NO: 1198 - RNA, 19 nt, Artificial Sequence
  Description of Artificial Sequence: Synthetic oligonucleotide
gugaaccccgagggcaaau

SEQ ID NO: 1199 - RNA, 19 nt, Artificial Sequence
  Description of Artificial Sequence: Synthetic oligonucleotide
uacagcuuuggugccaccu

SEQ ID NO: 1200 - RNA, 19 nt, Artificial Sequence
  Description of Artificial Sequence: Synthetic oligonucleotide
ugcgugaagaagugucccc

SEQ ID NO: 1201 - RNA, 19 nt, Artificial Sequence
  Description of Artificial Sequence: Synthetic oligonucleotide
cguaauuauguggugacag

SEQ ID NO: 1202 - RNA, 19 nt, Artificial Sequence
  Description of Artificial Sequence: Synthetic oligonucleotide
gaucacggcucgugcgucc

SEQ ID NO: 1203 - RNA, 19 nt, Artificial Sequence
  Description of Artificial Sequence: Synthetic oligonucleotide
cgagccuguggggccgaca

SEQ ID NO: 1204 - RNA, 19 nt, Artificial Sequence
  Description of Artificial Sequence: Synthetic oligonucleotide
agcuaugagauggaggaag

SEQ ID NO: 1205 - RNA, 19 nt, Artificial Sequence
  Description of Artificial Sequence: Synthetic oligonucleotide
gacggcguccgcaagugua

SEQ ID NO: 1206 - RNA, 19 nt, Artificial Sequence
  Description of Artificial Sequence: Synthetic oligonucleotide
aagaagugcgaagggccuu

SEQ ID NO: 1207 - RNA, 19 nt, Artificial Sequence
  Description of Artificial Sequence: Synthetic oligonucleotide
ugccgcaaaguguguaacg

SEQ ID NO: 1208 - RNA, 19 nt, Artificial Sequence
  Description of Artificial Sequence: Synthetic oligonucleotide
ggaauagguauuggugaau

SEQ ID NO: 1209 - RNA, 19 nt, Artificial Sequence
  Description of Artificial Sequence: Synthetic oligonucleotide
uuuaaagacucacucucca

SEQ ID NO: 1210 - RNA, 19 nt, Artificial Sequence
  Description of Artificial Sequence: Synthetic oligonucleotide
auaaaugcuacgaauauua

SEQ ID NO: 1211 - RNA, 19 nt, Artificial Sequence
  Description of Artificial Sequence: Synthetic oligonucleotide
aaacacuucaaaaacugca

SEQ ID NO: 1212 - RNA, 19 nt, Artificial Sequence
  Description of Artificial Sequence: Synthetic oligonucleotide
accuccaucaguggcgauc

SEQ ID NO: 1213 - RNA, 19 nt, Artificial Sequence
  Description of Artificial Sequence: Synthetic oligonucleotide
cuccacauccugccggugg

SEQ ID NO: 1214 - RNA, 19 nt, Artificial Sequence
  Description of Artificial Sequence: Synthetic oligonucleotide
gcauuuaggggugacuccu

SEQ ID NO: 1215 - RNA, 19 nt, Artificial Sequence
  Description of Artificial Sequence: Synthetic oligonucleotide
uucacacauacuccuccuc

SEQ ID NO: 1216 - RNA, 19 nt, Artificial Sequence
  Description of Artificial Sequence: Synthetic oligonucleotide
cuggauccacaggaacugg

SEQ ID NO: 1217 - RNA, 19 nt, Artificial Sequence
  Description of Artificial Sequence: Synthetic oligonucleotide
gauauucugaaaaccguaa

SEQ ID NO: 1218 - RNA, 19 nt, Artificial Sequence
  Description of Artificial Sequence: Synthetic oligonucleotide
aaggaaaucacagguuuga

SEQ ID NO: 1219 - RNA, 19 nt, Artificial Sequence
  Description of Artificial Sequence: Synthetic oligonucleotide
agcugaauuaucacaugaa

SEQ ID NO: 1220 - RNA, 19 nt, Artificial Sequence
  Description of Artificial Sequence: Synthetic oligonucleotide
auauaaaugggaaaucagu

SEQ ID NO: 1221 - RNA, 19 nt, Artificial Sequence
  Description of Artificial Sequence: Synthetic oligonucleotide
uguuuuagagagagaacuu

SEQ ID NO: 1222 - RNA, 19 nt, Artificial Sequence
  Description of Artificial Sequence: Synthetic oligonucleotide
uuucgacauauuuccuguu

SEQ ID NO: 1223 - RNA, 19 nt, Artificial Sequence
  Description of Artificial Sequence: Synthetic oligonucleotide
ucccuuggaauaaaaacau

SEQ ID NO: 1224 - RNA, 19 nt, Artificial Sequence
  Description of Artificial Sequence: Synthetic oligonucleotide
uuucuucugaaauuuuacc

SEQ ID NO: 1225 - RNA, 19 nt, Artificial Sequence
  Description of Artificial Sequence: Synthetic oligonucleotide
aaggaaaucacaggguuuu

SEQ ID NO: 1226 - RNA, 19 nt, Artificial Sequence
  Description of Artificial Sequence: Synthetic oligonucleotide
uugcugauucaggcuuggc

SEQ ID NO: 1227 - RNA, 19 nt, Artificial Sequence
  Description of Artificial Sequence: Synthetic oligonucleotide
ccugaaaacaggacggacc

SEQ ID NO: 1228 - RNA, 19 nt, Artificial Sequence
  Description of Artificial Sequence: Synthetic oligonucleotide
cuccaugccuuugagaacc

SEQ ID NO: 1229 - RNA, 19 nt, Artificial Sequence
  Description of Artificial Sequence: Synthetic oligonucleotide
cuagaaaucauacgcggca

SEQ ID NO: 1230 - RNA, 19 nt, Artificial Sequence
  Description of Artificial Sequence: Synthetic oligonucleotide
aggaccaagcaacaugguc

SEQ ID NO: 1231 - RNA, 19 nt, Artificial Sequence
  Description of Artificial Sequence: Synthetic oligonucleotide
caguuuucucuugcagucg

SEQ ID NO: 1232 - RNA, 19 nt, Artificial Sequence
  Description of Artificial Sequence: Synthetic oligonucleotide
gucagccugaacauaacau

SEQ ID NO: 1233 - RNA, 19 nt, Artificial Sequence
  Description of Artificial Sequence: Synthetic oligonucleotide
uccuugggauuacgcuccc

SEQ ID NO: 1234 - RNA, 19 nt, Artificial Sequence
  Description of Artificial Sequence: Synthetic oligonucleotide
cucaaggagauaagugaug

SEQ ID NO: 1235 - RNA, 19 nt, Artificial Sequence
  Description of Artificial Sequence: Synthetic oligonucleotide
ggagaugugauaauuucag

SEQ ID NO: 1236 - RNA, 19 nt, Artificial Sequence
  Description of Artificial Sequence: Synthetic oligonucleotide
ggaaacaaaaauuugugcu

SEQ ID NO: 1237 - RNA, 19 nt, Artificial Sequence
  Description of Artificial Sequence: Synthetic oligonucleotide
uaugcaaauacaauaaacu

SEQ ID NO: 1238 - RNA, 19 nt, Artificial Sequence
  Description of Artificial Sequence: Synthetic oligonucleotide
uggaaaaaacuguuuggga

SEQ ID NO: 1239 - RNA, 19 nt, Artificial Sequence
  Description of Artificial Sequence: Synthetic oligonucleotide
accuccggucagaaaacca

SEQ ID NO: 1240 - RNA, 19 nt, Artificial Sequence
  Description of Artificial Sequence: Synthetic oligonucleotide
aaaauuauaagcaacagag

SEQ ID NO: 1241 - RNA, 19 nt, Artificial Sequence
  Description of Artificial Sequence: Synthetic oligonucleotide
ggugaaaacagcugcaagg

SEQ ID NO: 1242 - RNA, 19 nt, Artificial Sequence
  Description of Artificial Sequence: Synthetic oligonucleotide
gccacaggccaggucugcc

SEQ ID NO: 1243 - RNA, 19 nt, Artificial Sequence
  Description of Artificial Sequence: Synthetic oligonucleotide
caugccuugugcucccccg

SEQ ID NO: 1244 - RNA, 19 nt, Artificial Sequence
  Description of Artificial Sequence: Synthetic oligonucleotide
gagggcugcuggggcccgg

SEQ ID NO: 1245 - RNA, 19 nt, Artificial Sequence
  Description of Artificial Sequence: Synthetic oligonucleotide
gagcccagggacugcgucu

SEQ ID NO: 1246 - RNA, 19 nt, Artificial Sequence
  Description of Artificial Sequence: Synthetic oligonucleotide
ucuugccggaaugucagcc

SEQ ID NO: 1247 - RNA, 19 nt, Artificial Sequence
  Description of Artificial Sequence: Synthetic oligonucleotide
cgaggcagggaaugcgugg

SEQ ID NO: 1248 - RNA, 19 nt, Artificial Sequence
  Description of Artificial Sequence: Synthetic oligonucleotide
gacaagugcaaccuucugg

SEQ ID NO: 1249 - RNA, 19 nt, Artificial Sequence
  Description of Artificial Sequence: Synthetic oligonucleotide
gagggugagccaagggagu

SEQ ID NO: 1250 - RNA, 19 nt, Artificial Sequence
  Description of Artificial Sequence: Synthetic oligonucleotide
uuuguggagaacucugagu

SEQ ID NO: 1251 - RNA, 19 nt, Artificial Sequence
  Description of Artificial Sequence: Synthetic oligonucleotide
ugcauacagugccacccag

SEQ ID NO: 1252 - RNA, 19 nt, Artificial Sequence
  Description of Artificial Sequence: Synthetic oligonucleotide
gagugccugccucaggcca

SEQ ID NO: 1253 - RNA, 19 nt, Artificial Sequence
  Description of Artificial Sequence: Synthetic oligonucleotide
augaacaucaccugcacag

SEQ ID NO: 1254 - RNA, 19 nt, Artificial Sequence
  Description of Artificial Sequence: Synthetic oligonucleotide
ggacggggaccagacaacu

SEQ ID NO: 1255 - RNA, 19 nt, Artificial Sequence
  Description of Artificial Sequence: Synthetic oligonucleotide
uguauccagugugcccacu

SEQ ID NO: 1256 - RNA, 19 nt, Artificial Sequence
  Description of Artificial Sequence: Synthetic oligonucleotide
uacauugacggcccccacu

SEQ ID NO: 1257 - RNA, 19 nt, Artificial Sequence
  Description of Artificial Sequence: Synthetic oligonucleotide
ugcgucaagaccugcccgg

SEQ ID NO: 1258 - RNA, 19 nt, Artificial Sequence
  Description of Artificial Sequence: Synthetic oligonucleotide
gcaggagucaugggagaaa

SEQ ID NO: 1259 - RNA, 19 nt, Artificial Sequence
  Description of Artificial Sequence: Synthetic oligonucleotide
aacaacacccuggucugga

SEQ ID NO: 1260 - RNA, 19 nt, Artificial Sequence
  Description of Artificial Sequence: Synthetic oligonucleotide
aaguacgcagacgccggcc

SEQ ID NO: 1261 - RNA, 19 nt, Artificial Sequence
  Description of Artificial Sequence: Synthetic oligonucleotide
caugugugccaccugugcc

SEQ ID NO: 1262 - RNA, 19 nt, Artificial Sequence
  Description of Artificial Sequence: Synthetic oligonucleotide
cauccaaacugcaccuacg

SEQ ID NO: 1263 - RNA, 19 nt, Artificial Sequence
  Description of Artificial Sequence: Synthetic oligonucleotide
ggguccuaauaaaucuuca

SEQ ID NO: 1264 - RNA, 19 nt, Artificial Sequence
  Description of Artificial Sequence: Synthetic oligonucleotide
acugucugacuuuagucuc

SEQ ID NO: 1265 - RNA, 19 nt, Artificial Sequence
  Description of Artificial Sequence: Synthetic oligonucleotide
cccacuaaaacugcauuuc

SEQ ID NO: 1266 - RNA, 19 nt, Artificial Sequence
  Description of Artificial Sequence: Synthetic oligonucleotide
ccuuucuacaauuucaauu

SEQ ID NO: 1267 - RNA, 19 nt, Artificial Sequence
  Description of Artificial Sequence: Synthetic oligonucleotide
uucucccuuugcuucaaau

SEQ ID NO: 1268 - RNA, 19 nt, Artificial Sequence
  Description of Artificial Sequence: Synthetic oligonucleotide
uaaaguccugacacuauuc

SEQ ID NO: 1269 - RNA, 19 nt, Artificial Sequence
  Description of Artificial Sequence: Synthetic oligonucleotide
ccugacacuauucauuuga

SEQ ID NO: 1270 - RNA, 19 nt, Artificial Sequence
  Description of Artificial Sequence: Synthetic oligonucleotide
ggaugcacugggccagguc

SEQ ID NO: 1271 - RNA, 19 nt, Artificial Sequence
  Description of Artificial Sequence: Synthetic oligonucleotide
cuugaaggcuguccaacga

SEQ ID NO: 1272 - RNA, 19 nt, Artificial Sequence
  Description of Artificial Sequence: Synthetic oligonucleotide
aaugggccuaagaucccgu

SEQ ID NO: 1273 - RNA, 19 nt, Artificial Sequence
  Description of Artificial Sequence: Synthetic oligonucleotide
uccaucgccacugggaugg

SEQ ID NO: 1274 - RNA, 19 nt, Artificial Sequence
  Description of Artificial Sequence: Synthetic oligonucleotide
gugggggcccuccucuugc

SEQ ID NO: 1275 - RNA, 19 nt, Artificial Sequence
  Description of Artificial Sequence: Synthetic oligonucleotide
cugcuggugguggcccugg

SEQ ID NO: 1276 - RNA, 19 nt, Artificial Sequence
  Description of Artificial Sequence: Synthetic oligonucleotide
gggaucggccucuucaugc

SEQ ID NO: 1277 - RNA, 19 nt, Artificial Sequence
  Description of Artificial Sequence: Synthetic oligonucleotide
cgaaggcgccacaucguuc

SEQ ID NO: 1278 - RNA, 19 nt, Artificial Sequence
  Description of Artificial Sequence: Synthetic oligonucleotide
cggaagcgcacgcugcgga

SEQ ID NO: 1279 - RNA, 19 nt, Artificial Sequence
  Description of Artificial Sequence: Synthetic oligonucleotide
aggcugcugcaggagaggg

SEQ ID NO: 1280 - RNA, 19 nt, Artificial Sequence
  Description of Artificial Sequence: Synthetic oligonucleotide
gagcuuguggagccucuua

SEQ ID NO: 1281 - RNA, 19 nt, Artificial Sequence
  Description of Artificial Sequence: Synthetic oligonucleotide
acacccaguggagaagcuc

SEQ ID NO: 1282 - RNA, 19 nt, Artificial Sequence
  Description of Artificial Sequence: Synthetic oligonucleotide
cccaaccaagcucucuuga

SEQ ID NO: 1283 - RNA, 19 nt, Artificial Sequence
  Description of Artificial Sequence: Synthetic oligonucleotide
aggaucuugaaggaaacug

SEQ ID NO: 1284 - RNA, 19 nt, Artificial Sequence
  Description of Artificial Sequence: Synthetic oligonucleotide
gaauucaaaaagaucaaag

SEQ ID NO: 1285 - RNA, 19 nt, Artificial Sequence
  Description of Artificial Sequence: Synthetic oligonucleotide
gugcugggcuccggugcgu

SEQ ID NO: 1286 - RNA, 19 nt, Artificial Sequence
  Description of Artificial Sequence: Synthetic oligonucleotide
uucggcacgguguauaagg

SEQ ID NO: 1287 - RNA, 19 nt, Artificial Sequence
  Description of Artificial Sequence: Synthetic oligonucleotide
ggacucuggaucccagaag

SEQ ID NO: 1288 - RNA, 19 nt, Artificial Sequence
  Description of Artificial Sequence: Synthetic oligonucleotide
ggugagaaaguuaaaauuc

SEQ ID NO: 1289 - RNA, 19 nt, Artificial Sequence
  Description of Artificial Sequence: Synthetic oligonucleotide
cccgucgcuaucaaggaau

SEQ ID NO: 1290 - RNA, 19 nt, Artificial Sequence
  Description of Artificial Sequence: Synthetic oligonucleotide
uuaagagaagcaacaucuc

SEQ ID NO: 1291 - RNA, 19 nt, Artificial Sequence
  Description of Artificial Sequence: Synthetic oligonucleotide
ccgaaagccaacaaggaaa

SEQ ID NO: 1292 - RNA, 19 nt, Artificial Sequence
  Description of Artificial Sequence: Synthetic oligonucleotide
auccucgaugaagccuacg

SEQ ID NO: 1293 - RNA, 19 nt, Artificial Sequence
  Description of Artificial Sequence: Synthetic oligonucleotide
gugauggccagcguggaca

SEQ ID NO: 1294 - RNA, 19 nt, Artificial Sequence
  Description of Artificial Sequence: Synthetic oligonucleotide
aacccccacgugugccgcc

SEQ ID NO: 1295 - RNA, 19 nt, Artificial Sequence
  Description of Artificial Sequence: Synthetic oligonucleotide
cugcugggcaucugccuca

SEQ ID NO: 1296 - RNA, 19 nt, Artificial Sequence
  Description of Artificial Sequence: Synthetic oligonucleotide
accuccaccgugcagcuca

SEQ ID NO: 1297 - RNA, 19 nt, Artificial Sequence
  Description of Artificial Sequence: Synthetic oligonucleotide
aucacgcagcucaugcccu

SEQ ID NO: 1298 - RNA, 19 nt, Artificial Sequence
  Description of Artificial Sequence: Synthetic oligonucleotide
uucggcugccuccuggacu

SEQ ID NO: 1299 - RNA, 19 nt, Artificial Sequence
  Description of Artificial Sequence: Synthetic oligonucleotide
uauguccgggaacacaaag

SEQ ID NO: 1300 - RNA, 19 nt, Artificial Sequence
  Description of Artificial Sequence: Synthetic oligonucleotide
gacaauauuggcucccagu

SEQ ID NO: 1301 - RNA, 19 nt, Artificial Sequence
  Description of Artificial Sequence: Synthetic oligonucleotide
uaccugcucaacuggugug

SEQ ID NO: 1302 - RNA, 19 nt, Artificial Sequence
  Description of Artificial Sequence: Synthetic oligonucleotide
gugcagaucgcaaagggca

SEQ ID NO: 1303 - RNA, 19 nt, Artificial Sequence
  Description of Artificial Sequence: Synthetic oligonucleotide
augaacuacuuggaggacc

SEQ ID NO: 1304 - RNA, 19 nt, Artificial Sequence
  Description of Artificial Sequence: Synthetic oligonucleotide
cgucgcuuggugcaccgcg

SEQ ID NO: 1305 - RNA, 19 nt, Artificial Sequence
  Description of Artificial Sequence: Synthetic oligonucleotide
gaccuggcagccaggaacg

SEQ ID NO: 1306 - RNA, 19 nt, Artificial Sequence
  Description of Artificial Sequence: Synthetic oligonucleotide
guacuggugaaaacaccgc

SEQ ID NO: 1307 - RNA, 19 nt, Artificial Sequence
  Description of Artificial Sequence: Synthetic oligonucleotide
cagcaugucaagaucacag

SEQ ID NO: 1308 - RNA, 19 nt, Artificial Sequence
  Description of Artificial Sequence: Synthetic oligonucleotide
gauuuugggcuggccaaac

SEQ ID NO: 1309 - RNA, 19 nt, Artificial Sequence
  Description of Artificial Sequence: Synthetic oligonucleotide
cugcugggugcggaagaga

SEQ ID NO: 1310 - RNA, 19 nt, Artificial Sequence
  Description of Artificial Sequence: Synthetic oligonucleotide
aaagaauaccaugcagaag

SEQ ID NO: 1311 - RNA, 19 nt, Artificial Sequence
  Description of Artificial Sequence: Synthetic oligonucleotide
ggaggcaaagugccuauca

SEQ ID NO: 1312 - RNA, 19 nt, Artificial Sequence
  Description of Artificial Sequence: Synthetic oligonucleotide
aaguggauggcauuggaau

SEQ ID NO: 1313 - RNA, 19 nt, Artificial Sequence
  Description of Artificial Sequence: Synthetic oligonucleotide
ucaauuuuacacagaaucu

SEQ ID NO: 1314 - RNA, 19 nt, Artificial Sequence
  Description of Artificial Sequence: Synthetic oligonucleotide
uauacccaccagagugaug

SEQ ID NO: 1315 - RNA, 19 nt, Artificial Sequence
  Description of Artificial Sequence: Synthetic oligonucleotide
gucuggagcuacgggguga

SEQ ID NO: 1316 - RNA, 19 nt, Artificial Sequence
  Description of Artificial Sequence: Synthetic oligonucleotide
accguuugggaguugauga

SEQ ID NO: 1317 - RNA, 19 nt, Artificial Sequence
  Description of Artificial Sequence: Synthetic oligonucleotide
accuuuggauccaagccau

SEQ ID NO: 1318 - RNA, 19 nt, Artificial Sequence
  Description of Artificial Sequence: Synthetic oligonucleotide
uaugacggaaucccugcca

SEQ ID NO: 1319 - RNA, 19 nt, Artificial Sequence
  Description of Artificial Sequence: Synthetic oligonucleotide
agcgagaucuccuccaucc

SEQ ID NO: 1320 - RNA, 19 nt, Artificial Sequence
  Description of Artificial Sequence: Synthetic oligonucleotide
cuggagaaaggagaacgcc

SEQ ID NO: 1321 - RNA, 19 nt, Artificial Sequence
  Description of Artificial Sequence: Synthetic oligonucleotide
cucccucagccacccauau

SEQ ID NO: 1322 - RNA, 19 nt, Artificial Sequence
  Description of Artificial Sequence: Synthetic oligonucleotide
uguaccaucgaugucuaca

SEQ ID NO: 1323 - RNA, 19 nt, Artificial Sequence
  Description of Artificial Sequence: Synthetic oligonucleotide
augaucauggucaagugcu

SEQ ID NO: 1324 - RNA, 19 nt, Artificial Sequence
  Description of Artificial Sequence: Synthetic oligonucleotide
uggaugauagacgcagaua

SEQ ID NO: 1325 - RNA, 19 nt, Artificial Sequence
  Description of Artificial Sequence: Synthetic oligonucleotide
agucgcccaaaguuccgug

SEQ ID NO: 1326 - RNA, 19 nt, Artificial Sequence
  Description of Artificial Sequence: Synthetic oligonucleotide
gaguugaucaucgaauucu

SEQ ID NO: 1327 - RNA, 19 nt, Artificial Sequence
  Description of Artificial Sequence: Synthetic oligonucleotide
uccaaaauggcccgagacc

SEQ ID NO: 1328 - RNA, 19 nt, Artificial Sequence
  Description of Artificial Sequence: Synthetic oligonucleotide
ccccagcgcuaccuuguca

SEQ ID NO: 1329 - RNA, 19 nt, Artificial Sequence
  Description of Artificial Sequence: Synthetic oligonucleotide
auucagggggaugaaagaa

SEQ ID NO: 1330 - RNA, 19 nt, Artificial Sequence
  Description of Artificial Sequence: Synthetic oligonucleotide
augcauuugccaaguccua

SEQ ID NO: 1331 - RNA, 19 nt, Artificial Sequence
  Description of Artificial Sequence: Synthetic oligonucleotide
acagacuccaacuucuacc

SEQ ID NO: 1332 - RNA, 19 nt, Artificial Sequence
  Description of Artificial Sequence: Synthetic oligonucleotide
cgugcccugauggaugaag

SEQ ID NO: 1333 - RNA, 19 nt, Artificial Sequence
  Description of Artificial Sequence: Synthetic oligonucleotide
gaagacauggacgacgugg

SEQ ID NO: 1334 - RNA, 19 nt, Artificial Sequence
  Description of Artificial Sequence: Synthetic oligonucleotide
guggaugccgacgaguacc

SEQ ID NO: 1335 - RNA, 19 nt, Artificial Sequence
  Description of Artificial Sequence: Synthetic oligonucleotide
cucaucccacagcagggcu

SEQ ID NO: 1336 - RNA, 19 nt, Artificial Sequence
  Description of Artificial Sequence: Synthetic oligonucleotide
uucuucagcagccccucca

SEQ ID NO: 1337 - RNA, 19 nt, Artificial Sequence
  Description of Artificial Sequence: Synthetic oligonucleotide
acgucacggacuccccucc

SEQ ID NO: 1338 - RNA, 19 nt, Artificial Sequence
  Description of Artificial Sequence: Synthetic oligonucleotide
cugagcucucugagugcaa

SEQ ID NO: 1339 - RNA, 19 nt, Artificial Sequence
  Description of Artificial Sequence: Synthetic oligonucleotide
accagcaacaauuccaccg

SEQ ID NO: 1340 - RNA, 19 nt, Artificial Sequence
  Description of Artificial Sequence: Synthetic oligonucleotide
guggcuugcauugauagaa

SEQ ID NO: 1341 - RNA, 19 nt, Artificial Sequence
  Description of Artificial Sequence: Synthetic oligonucleotide
aaugggcugcaaagcuguc

SEQ ID NO: 1342 - RNA, 19 nt, Artificial Sequence
  Description of Artificial Sequence: Synthetic oligonucleotide
cccaucaaggaagacagcu

SEQ ID NO: 1343 - RNA, 19 nt, Artificial Sequence
  Description of Artificial Sequence: Synthetic oligonucleotide
uucuugcagcgauacagcu

SEQ ID NO: 1344 - RNA, 19 nt, Artificial Sequence
  Description of Artificial Sequence: Synthetic oligonucleotide
ucagaccccacaggcgccu

SEQ ID NO: 1345 - RNA, 19 nt, Artificial Sequence
  Description of Artificial Sequence: Synthetic oligonucleotide
uugacugaggacagcauag

SEQ ID NO: 1346 - RNA, 19 nt, Artificial Sequence
  Description of Artificial Sequence: Synthetic oligonucleotide
gacgacaccuuccucccag

SEQ ID NO: 1347 - RNA, 19 nt, Artificial Sequence
  Description of Artificial Sequence: Synthetic oligonucleotide
gugccugaauacauaaacc

SEQ ID NO: 1348 - RNA, 19 nt, Artificial Sequence
  Description of Artificial Sequence: Synthetic oligonucleotide
caguccguucccaaaaggc

SEQ ID NO: 1349 - RNA, 19 nt, Artificial Sequence
  Description of Artificial Sequence: Synthetic oligonucleotide
cccgcuggcucugugcaga

SEQ ID NO: 1350 - RNA, 19 nt, Artificial Sequence
  Description of Artificial Sequence: Synthetic oligonucleotide
aauccugucuaucacaauc

SEQ ID NO: 1351 - RNA, 19 nt, Artificial Sequence
  Description of Artificial Sequence: Synthetic oligonucleotide
cagccucugaaccccgcgc

SEQ ID NO: 1352 - RNA, 19 nt, Artificial Sequence
  Description of Artificial Sequence: Synthetic oligonucleotide
cccagcagagacccacacu

SEQ ID NO: 1353 - RNA, 19 nt, Artificial Sequence
  Description of Artificial Sequence: Synthetic oligonucleotide
uaccaggacccccacagca

SEQ ID NO: 1354 - RNA, 19 nt, Artificial Sequence
  Description of Artificial Sequence: Synthetic oligonucleotide
acugcagugggcaaccccg

SEQ ID NO: 1355 - RNA, 19 nt, Artificial Sequence
  Description of Artificial Sequence: Synthetic oligonucleotide
gaguaucucaacacugucc

SEQ ID NO: 1356 - RNA, 19 nt, Artificial Sequence
  Description of Artificial Sequence: Synthetic oligonucleotide
cagcccaccugugucaaca

SEQ ID NO: 1357 - RNA, 19 nt, Artificial Sequence
  Description of Artificial Sequence: Synthetic oligonucleotide
agcacauucgacagcccug

SEQ ID NO: 1358 - RNA, 19 nt, Artificial Sequence
  Description of Artificial Sequence: Synthetic oligonucleotide
gcccacugggcccagaaag

SEQ ID NO: 1359 - RNA, 19 nt, Artificial Sequence
  Description of Artificial Sequence: Synthetic oligonucleotide
ggcagccaccaaauuagcc

SEQ ID NO: 1360 - RNA, 19 nt, Artificial Sequence
  Description of Artificial Sequence: Synthetic oligonucleotide
cuggacaacccugacuacc

SEQ ID NO: 1361 - RNA, 19 nt, Artificial Sequence
  Description of Artificial Sequence: Synthetic oligonucleotide
cagcaggacuucuuuccca

SEQ ID NO: 1362 - RNA, 19 nt, Artificial Sequence
  Description of Artificial Sequence: Synthetic oligonucleotide
aaggaagccaagccaaaug

SEQ ID NO: 1363 - RNA, 19 nt, Artificial Sequence
  Description of Artificial Sequence: Synthetic oligonucleotide
ggcaucuuuaagggcucca

SEQ ID NO: 1364 - RNA, 19 nt, Artificial Sequence
  Description of Artificial Sequence: Synthetic oligonucleotide
acagcugaaaaugcagaau

SEQ ID NO: 1365 - RNA, 19 nt, Artificial Sequence
  Description of Artificial Sequence: Synthetic oligonucleotide
uaccuaagggucgcgccac

SEQ ID NO: 1366 - RNA, 19 nt, Artificial Sequence
  Description of Artificial Sequence: Synthetic oligonucleotide
caaagcagugaauuuauug

SEQ ID NO: 1367 - RNA, 19 nt, Artificial Sequence
  Description of Artificial Sequence: Synthetic oligonucleotide
ggagcaugaccacggagga

SEQ ID NO: 1368 - RNA, 19 nt, Artificial Sequence
  Description of Artificial Sequence: Synthetic oligonucleotide
auaguaugagcccuaaaaa

SEQ ID NO: 1369 - RNA, 19 nt, Artificial Sequence
  Description of Artificial Sequence: Synthetic oligonucleotide
auccagacucuuucgauac

SEQ ID NO: 1370 - RNA, 19 nt, Artificial Sequence
  Description of Artificial Sequence: Synthetic oligonucleotide
cccaggaccaagccacagc

SEQ ID NO: 1371 - RNA, 19 nt, Artificial Sequence
  Description of Artificial Sequence: Synthetic oligonucleotide
cagguccuccaucccaaca

SEQ ID NO: 1372 - RNA, 19 nt, Artificial Sequence
  Description of Artificial Sequence: Synthetic oligonucleotide
agccaugcccgcauuagcu

SEQ ID NO: 1373 - RNA, 19 nt, Artificial Sequence
  Description of Artificial Sequence: Synthetic oligonucleotide
ucuuagacccacagacugg

SEQ ID NO: 1374 - RNA, 19 nt, Artificial Sequence
  Description of Artificial Sequence: Synthetic oligonucleotide
guuuugcaacguuuacacc

SEQ ID NO: 1375 - RNA, 19 nt, Artificial Sequence
  Description of Artificial Sequence: Synthetic oligonucleotide
cgacuagccaggaaguacu

SEQ ID NO: 1376 - RNA, 19 nt, Artificial Sequence
  Description of Artificial Sequence: Synthetic oligonucleotide
uuccaccucgggcacauuu

SEQ ID NO: 1377 - RNA, 19 nt, Artificial Sequence
  Description of Artificial Sequence: Synthetic oligonucleotide
uugggaaguugcauuccuu

SEQ ID NO: 1378 - RNA, 19 nt, Artificial Sequence
  Description of Artificial Sequence: Synthetic oligonucleotide
uugucuucaaacugugaag

SEQ ID NO: 1379 - RNA, 19 nt, Artificial Sequence
  Description of Artificial Sequence: Synthetic oligonucleotide
gcauuuacagaaacgcauc

SEQ ID NO: 1380 - RNA, 19 nt, Artificial Sequence
  Description of Artificial Sequence: Synthetic oligonucleotide
ccagcaagaauauuguccc

SEQ ID NO: 1381 - RNA, 19 nt, Artificial Sequence
  Description of Artificial Sequence: Synthetic oligonucleotide
cuuugagcagaaauuuauc

SEQ ID NO: 1382 - RNA, 19 nt, Artificial Sequence
  Description of Artificial Sequence: Synthetic oligonucleotide
cuuucaaagagguauauuu

SEQ ID NO: 1383 - RNA, 19 nt, Artificial Sequence
  Description of Artificial Sequence: Synthetic oligonucleotide
uaugugaggauuuuuauug

SEQ ID NO: 1384 - RNA, 19 nt, Artificial Sequence
  Description of Artificial Sequence: Synthetic oligonucleotide
gauuggggaucuuggaguu

SEQ ID NO: 1385 - RNA, 19 nt, Artificial Sequence
  Description of Artificial Sequence: Synthetic oligonucleotide
uuuucauugucgcuauuga

SEQ ID NO: 1386 - RNA, 19 nt, Artificial Sequence
  Description of Artificial Sequence: Synthetic oligonucleotide
auuuuuacuucaaugggcu

SEQ ID NO: 1387 - RNA, 19 nt, Artificial Sequence
  Description of Artificial Sequence: Synthetic oligonucleotide
ucuuccaacaaggaagaag

SEQ ID NO: 1388 - RNA, 19 nt, Artificial Sequence
  Description of Artificial Sequence: Synthetic oligonucleotide
gcuugcugguagcacuugc

SEQ ID NO: 1389 - RNA, 19 nt, Artificial Sequence
  Description of Artificial Sequence: Synthetic oligonucleotide
cuacccugaguucauccag

SEQ ID NO: 1390 - RNA, 19 nt, Artificial Sequence
  Description of Artificial Sequence: Synthetic oligonucleotide
ggcccaacugugagcaagg

SEQ ID NO: 1391 - RNA, 19 nt, Artificial Sequence
  Description of Artificial Sequence: Synthetic oligonucleotide
gagcacaagccacaagucu

SEQ ID NO: 1392 - RNA, 19 nt, Artificial Sequence
  Description of Artificial Sequence: Synthetic oligonucleotide
uuccagaggaugcuugauu

SEQ ID NO: 1393 - RNA, 19 nt, Artificial Sequence
  Description of Artificial Sequence: Synthetic oligonucleotide
uccagugguucugcuucaa

SEQ ID NO: 1394 - RNA, 19 nt, Artificial Sequence
  Description of Artificial Sequence: Synthetic oligonucleotide
aggcuuccacugcaaaaca

SEQ ID NO: 1395 - RNA, 19 nt, Artificial Sequence
  Description of Artificial Sequence: Synthetic oligonucleotide
acuaaagauccaagaaggc

SEQ ID NO: 1396 - RNA, 19 nt, Artificial Sequence
  Description of Artificial Sequence: Synthetic oligonucleotide
ccuucauggccccagcagg

SEQ ID NO: 1397 - RNA, 19 nt, Artificial Sequence
  Description of Artificial Sequence: Synthetic oligonucleotide
gccggaucgguacuguauc

SEQ ID NO: 1398 - RNA, 19 nt, Artificial Sequence
  Description of Artificial Sequence: Synthetic oligonucleotide
caagucauggcagguacag

SEQ ID NO: 1399 - RNA, 19 nt, Artificial Sequence
  Description of Artificial Sequence: Synthetic oligonucleotide
guaggauaagccacucugu

SEQ ID NO: 1400 - RNA, 19 nt, Artificial Sequence
  Description of Artificial Sequence: Synthetic oligonucleotide
ucccuuccugggcaaagaa

SEQ ID NO: 1401 - RNA, 19 nt, Artificial Sequence
  Description of Artificial Sequence: Synthetic oligonucleotide
agaaacggaggggauggaa

SEQ ID NO: 1402 - RNA, 19 nt, Artificial Sequence
  Description of Artificial Sequence: Synthetic oligonucleotide
auucuuccuuagacuuacu

SEQ ID NO: 1403 - RNA, 19 nt, Artificial Sequence
  Description of Artificial Sequence: Synthetic oligonucleotide
uuuuguaaaaaugucccca

SEQ ID NO: 1404 - RNA, 19 nt, Artificial Sequence
  Description of Artificial Sequence: Synthetic oligonucleotide
acgguacuuacuccccacu

SEQ ID NO: 1405 - RNA, 19 nt, Artificial Sequence
  Description of Artificial Sequence: Synthetic oligonucleotide
ugauggaccagugguuucc

SEQ ID NO: 1406 - RNA, 19 nt, Artificial Sequence
  Description of Artificial Sequence: Synthetic oligonucleotide
cagucaugagcguuagacu

SEQ ID NO: 1407 - RNA, 19 nt, Artificial Sequence
  Description of Artificial Sequence: Synthetic oligonucleotide
ugacuuguuugucuuccau

SEQ ID NO: 1408 - RNA, 19 nt, Artificial Sequence
  Description of Artificial Sequence: Synthetic oligonucleotide
uuccauuguuuugaaacuc

SEQ ID NO: 1409 - RNA, 19 nt, Artificial Sequence
  Description of Artificial Sequence: Synthetic oligonucleotide
caguaugcugccccugucu

SEQ ID NO: 1410 - RNA, 19 nt, Artificial Sequence
  Description of Artificial Sequence: Synthetic oligonucleotide
uugcugucaugaaaucagc

SEQ ID NO: 1411 - RNA, 19 nt, Artificial Sequence
  Description of Artificial Sequence: Synthetic oligonucleotide
caagagaggaugacacauc

SEQ ID NO: 1412 - RNA, 19 nt, Artificial Sequence
  Description of Artificial Sequence: Synthetic oligonucleotide
caaauaauaacucggauuc

SEQ ID NO: 1413 - RNA, 19 nt, Artificial Sequence
  Description of Artificial Sequence: Synthetic oligonucleotide
ccagcccacauuggauuca

SEQ ID NO: 1414 - RNA, 19 nt, Artificial Sequence
  Description of Artificial Sequence: Synthetic oligonucleotide
aucagcauuuggaccaaua

SEQ ID NO: 1415 - RNA, 19 nt, Artificial Sequence
  Description of Artificial Sequence: Synthetic oligonucleotide
agcccacagcugagaaugu

SEQ ID NO: 1416 - RNA, 19 nt, Artificial Sequence
  Description of Artificial Sequence: Synthetic oligonucleotide
uggaauaccuaaggauagc

SEQ ID NO: 1417 - RNA, 19 nt, Artificial Sequence
  Description of Artificial Sequence: Synthetic oligonucleotide
caccgcuuuuguucucgca

SEQ ID NO: 1418 - RNA, 19 nt, Artificial Sequence
  Description of Artificial Sequence: Synthetic oligonucleotide
aaaaacguaucuccuaauu

SEQ ID NO: 1419 - RNA, 19 nt, Artificial Sequence
  Description of Artificial Sequence: Synthetic oligonucleotide
uugaggcucagaugaaaug

SEQ ID NO: 1420 - RNA, 19 nt, Artificial Sequence
  Description of Artificial Sequence: Synthetic oligonucleotide
gcaucagguccuuuggggc

SEQ ID NO: 1421 - RNA, 19 nt, Artificial Sequence
  Description of Artificial Sequence: Synthetic oligonucleotide
cauagaucagaagacuaca

SEQ ID NO: 1422 - RNA, 19 nt, Artificial Sequence
  Description of Artificial Sequence: Synthetic oligonucleotide
aaaaaugaagcugcucuga

SEQ ID NO: 1423 - RNA, 19 nt, Artificial Sequence
  Description of Artificial Sequence: Synthetic oligonucleotide
aaaucuccuuuagccauca

SEQ ID NO: 1424 - RNA, 19 nt, Artificial Sequence
  Description of Artificial Sequence: Synthetic oligonucleotide
accccaaccccccaaaauu

SEQ ID NO: 1425 - RNA, 19 nt, Artificial Sequence
  Description of Artificial Sequence: Synthetic oligonucleotide
uaguuuguguuacuuaugg

SEQ ID NO: 1426 - RNA, 19 nt, Artificial Sequence
  Description of Artificial Sequence: Synthetic oligonucleotide
gaagauaguuuucuccuuu

SEQ ID NO: 1427 - RNA, 19 nt, Artificial Sequence
  Description of Artificial Sequence: Synthetic oligonucleotide
uuacuucacuucaaaagcu

SEQ ID NO: 1428 - RNA, 19 nt, Artificial Sequence
  Description of Artificial Sequence: Synthetic oligonucleotide
uuuuuacucaaagaguaua

SEQ ID NO: 1429 - RNA, 19 nt, Artificial Sequence
  Description of Artificial Sequence: Synthetic oligonucleotide
auguucccuccaggucagc

SEQ ID NO: 1430 - RNA, 19 nt, Artificial Sequence
  Description of Artificial Sequence: Synthetic oligonucleotide
cugcccccaaacccccucc

SEQ ID NO: 1431 - RNA, 19 nt, Artificial Sequence
  Description of Artificial Sequence: Synthetic oligonucleotide
cuuacgcuuugucacacaa

SEQ ID NO: 1432 - RNA, 19 nt, Artificial Sequence
  Description of Artificial Sequence: Synthetic oligonucleotide
aaaagugucucugccuuga

SEQ ID NO: 1433 - RNA, 19 nt, Artificial Sequence
  Description of Artificial Sequence: Synthetic oligonucleotide
agucaucuauucaagcacu

SEQ ID NO: 1434 - RNA, 19 nt, Artificial Sequence
  Description of Artificial Sequence: Synthetic oligonucleotide
uuacagcucuggccacaac

SEQ ID NO: 1435 - RNA, 19 nt, Artificial Sequence
  Description of Artificial Sequence: Synthetic oligonucleotide
cagggcauuuuacaggugc

SEQ ID NO: 1436 - RNA, 19 nt, Artificial Sequence
  Description of Artificial Sequence: Synthetic oligonucleotide
cgaaugacaguagcauuau

SEQ ID NO: 1437 - RNA, 19 nt, Artificial Sequence
  Description of Artificial Sequence: Synthetic oligonucleotide
ugaguaguguggaauucag

SEQ ID NO: 1438 - RNA, 19 nt, Artificial Sequence
  Description of Artificial Sequence: Synthetic oligonucleotide
gguaguaaauaugaaacua

SEQ ID NO: 1439 - RNA, 19 nt, Artificial Sequence
  Description of Artificial Sequence: Synthetic oligonucleotide
aggguuugaaauugauaau

SEQ ID NO: 1440 - RNA, 19 nt, Artificial Sequence
  Description of Artificial Sequence: Synthetic oligonucleotide
ugcuuucacaacauuugca

SEQ ID NO: 1441 - RNA, 19 nt, Artificial Sequence
  Description of Artificial Sequence: Synthetic oligonucleotide
agauguuuuagaaggaaaa

SEQ ID NO: 1442 - RNA, 19 nt, Artificial Sequence
  Description of Artificial Sequence: Synthetic oligonucleotide
aaaguuccuuccuaaaaua

SEQ ID NO: 1443 - RNA, 19 nt, Artificial Sequence
  Description of Artificial Sequence: Synthetic oligonucleotide
aauuucucuacaauuggaa

SEQ ID NO: 1444 - RNA, 19 nt, Artificial Sequence
  Description of Artificial Sequence: Synthetic oligonucleotide
agauuggaagauucagcua

SEQ ID NO: 1445 - RNA, 19 nt, Artificial Sequence
  Description of Artificial Sequence: Synthetic oligonucleotide
aguuaggagcccaccuuuu

SEQ ID NO: 1446 - RNA, 19 nt, Artificial Sequence
  Description of Artificial Sequence: Synthetic oligonucleotide
uuuccuaaucugugugugc

SEQ ID NO: 1447 - RNA, 19 nt, Artificial Sequence
  Description of Artificial Sequence: Synthetic oligonucleotide
cccuguaaccugacugguu

SEQ ID NO: 1448 - RNA, 19 nt, Artificial Sequence
  Description of Artificial Sequence: Synthetic oligonucleotide
uaacagcaguccuuuguaa

SEQ ID NO: 1449 - RNA, 19 nt, Artificial Sequence
  Description of Artificial Sequence: Synthetic oligonucleotide
aacaguguuuuaaacucuc

SEQ ID NO: 1450 - RNA, 19 nt, Artificial Sequence
  Description of Artificial Sequence: Synthetic oligonucleotide
ccuagucaauauccacccc

SEQ ID NO: 1451 - RNA, 19 nt, Artificial Sequence
  Description of Artificial Sequence: Synthetic oligonucleotide
cauccaauuuaucaaggaa

SEQ ID NO: 1452 - RNA, 19 nt, Artificial Sequence
  Description of Artificial Sequence: Synthetic oligonucleotide
agaaaugguucagaaaaua

SEQ ID NO: 1453 - RNA, 19 nt, Artificial Sequence
  Description of Artificial Sequence: Synthetic oligonucleotide
auuuucagccuacaguuau

SEQ ID NO: 1454 - RNA, 19 nt, Artificial Sequence
  Description of Artificial Sequence: Synthetic oligonucleotide
uguucagucacacacacau

SEQ ID NO: 1455 - RNA, 19 nt, Artificial Sequence
  Description of Artificial Sequence: Synthetic oligonucleotide
uacaaaauguuccuuuugc

SEQ ID NO: 1456 - RNA, 19 nt, Artificial Sequence
  Description of Artificial Sequence: Synthetic oligonucleotide
cuuuuaaaguaauuuuuga

SEQ ID NO: 1457 - RNA, 19 nt, Artificial Sequence
  Description of Artificial Sequence: Synthetic oligonucleotide
acucccagaucagucagag

SEQ ID NO: 1458 - RNA, 19 nt, Artificial Sequence
  Description of Artificial Sequence: Synthetic oligonucleotide
gccccuacagcauuguuaa

SEQ ID NO: 1459 - RNA, 19 nt, Artificial Sequence
  Description of Artificial Sequence: Synthetic oligonucleotide
agaaaguauuugauuuuug

SEQ ID NO: 1460 - RNA, 19 nt, Artificial Sequence
  Description of Artificial Sequence: Synthetic oligonucleotide
gucucaaugaaaauaaaac

SEQ ID NO: 1461 - RNA, 19 nt, Artificial Sequence
  Description of Artificial Sequence: Synthetic oligonucleotide
cuauauucauuuccacucu

SEQ ID NO: 1462 - RNA, 19 nt, Artificial Sequence
  Description of Artificial Sequence: Synthetic oligonucleotide
gggccaggaaaugagaguc

SEQ ID NO: 1463 - RNA, 19 nt, Artificial Sequence
  Description of Artificial Sequence: Synthetic oligonucleotide
cucaaagccauguuauucu

SEQ ID NO: 1464 - RNA, 19 nt, Artificial Sequence
  Description of Artificial Sequence: Synthetic oligonucleotide
ugccuuuuuaaacuaucau

SEQ ID NO: 1465 - RNA, 19 nt, Artificial Sequence
  Description of Artificial Sequence: Synthetic oligonucleotide
uccuguaaucaaaguaaug

SEQ ID NO: 1466 - RNA, 19 nt, Artificial Sequence
  Description of Artificial Sequence: Synthetic oligonucleotide
gauggcagcgugucccacc

SEQ ID NO: 1467 - RNA, 19 nt, Artificial Sequence
  Description of Artificial Sequence: Synthetic oligonucleotide
cagagcgggagcccagcug

SEQ ID NO: 1468 - RNA, 19 nt, Artificial Sequence
  Description of Artificial Sequence: Synthetic oligonucleotide
gcucaggagucaugcuuag

SEQ ID NO: 1469 - RNA, 19 nt, Artificial Sequence
  Description of Artificial Sequence: Synthetic oligonucleotide
ggauggaucccuucucuuc

SEQ ID NO: 1470 - RNA, 19 nt, Artificial Sequence
  Description of Artificial Sequence: Synthetic oligonucleotide
cugccgucagaguuucagc

SEQ ID NO: 1471 - RNA, 19 nt, Artificial Sequence
  Description of Artificial Sequence: Synthetic oligonucleotide
cuggguugggguggaugca

SEQ ID NO: 1472 - RNA, 19 nt, Artificial Sequence
  Description of Artificial Sequence: Synthetic oligonucleotide
agccaccuccaugccuggc

SEQ ID NO: 1473 - RNA, 19 nt, Artificial Sequence
  Description of Artificial Sequence: Synthetic oligonucleotide
ccuucugcaucugugauca

SEQ ID NO: 1474 - RNA, 19 nt, Artificial Sequence
  Description of Artificial Sequence: Synthetic oligonucleotide
aucacggccuccuccugcc

SEQ ID NO: 1475 - RNA, 19 nt, Artificial Sequence
  Description of Artificial Sequence: Synthetic oligonucleotide
cacugagccucaugccuuc

SEQ ID NO: 1476 - RNA, 19 nt, Artificial Sequence
  Description of Artificial Sequence: Synthetic oligonucleotide
cacgugucuguuccccccg

SEQ ID NO: 1477 - RNA, 19 nt, Artificial Sequence
  Description of Artificial Sequence: Synthetic oligonucleotide
gcuuuuccuuucugccacc

SEQ ID NO: 1478 - RNA, 19 nt, Artificial Sequence
  Description of Artificial Sequence: Synthetic oligonucleotide
cccugcacgugggccgcca

SEQ ID NO: 1479 - RNA, 19 nt, Artificial Sequence
  Description of Artificial Sequence: Synthetic oligonucleotide
agguucccaagaguauccu

SEQ ID NO: 1480 - RNA, 19 nt, Artificial Sequence
  Description of Artificial Sequence: Synthetic oligonucleotide
uacccauuuccuuccuucc

SEQ ID NO: 1481 - RNA, 19 nt, Artificial Sequence
  Description of Artificial Sequence: Synthetic oligonucleotide
cacucccuuugccagugcc

SEQ ID NO: 1482 - RNA, 19 nt, Artificial Sequence
  Description of Artificial Sequence: Synthetic oligonucleotide
cucucaccccaacuaguag

SEQ ID NO: 1483 - RNA, 19 nt, Artificial Sequence
  Description of Artificial Sequence: Synthetic oligonucleotide
gcuaaccaucacccccagg

SEQ ID NO: 1484 - RNA, 19 nt, Artificial Sequence
  Description of Artificial Sequence: Synthetic oligonucleotide
gacugaccucuuccuccuc

SEQ ID NO: 1485 - RNA, 19 nt, Artificial Sequence
  Description of Artificial Sequence: Synthetic oligonucleotide
cgcugccagaugauuguuc

SEQ ID NO: 1486 - RNA, 19 nt, Artificial Sequence
  Description of Artificial Sequence: Synthetic oligonucleotide
caaagcacagaauuuguca

SEQ ID NO: 1487 - RNA, 19 nt, Artificial Sequence
  Description of Artificial Sequence: Synthetic oligonucleotide
agaaaccugcagggacucc

SEQ ID NO: 1488 - RNA, 19 nt, Artificial Sequence
  Description of Artificial Sequence: Synthetic oligonucleotide
caugcugccagccuucucc

SEQ ID NO: 1489 - RNA, 19 nt, Artificial Sequence
  Description of Artificial Sequence: Synthetic oligonucleotide
cguaauuagcauggcccca

SEQ ID NO: 1490 - RNA, 19 nt, Artificial Sequence
  Description of Artificial Sequence: Synthetic oligonucleotide
aguccaugcuucuagccuu

SEQ ID NO: 1491 - RNA, 19 nt, Artificial Sequence
  Description of Artificial Sequence: Synthetic oligonucleotide
ugguuccuucugccccucu

SEQ ID NO: 1492 - RNA, 19 nt, Artificial Sequence
  Description of Artificial Sequence: Synthetic oligonucleotide
uguuugaaauucuagagcc

SEQ ID NO: 1493 - RNA, 19 nt, Artificial Sequence
  Description of Artificial Sequence: Synthetic oligonucleotide
cagcugugggacaauuauc

SEQ ID NO: 1494 - RNA, 19 nt, Artificial Sequence
  Description of Artificial Sequence: Synthetic oligonucleotide
cugugucaaaagccagaug

SEQ ID NO: 1495 - RNA, 19 nt, Artificial Sequence
  Description of Artificial Sequence: Synthetic oligonucleotide
gugaaaacaucucaauaac

SEQ ID NO: 1496 - RNA, 19 nt, Artificial Sequence
  Description of Artificial Sequence: Synthetic oligonucleotide
caaacuggcugcuuuguuc

SEQ ID NO: 1497 - RNA, 19 nt, Artificial Sequence
  Description of Artificial Sequence: Synthetic oligonucleotide
caaugcuagaacaacgccu

SEQ ID NO: 1498 - RNA, 19 nt, Artificial Sequence
  Description of Artificial Sequence: Synthetic oligonucleotide
ugucacagaguagaaacuc

SEQ ID NO: 1499 - RNA, 19 nt, Artificial Sequence
  Description of Artificial Sequence: Synthetic oligonucleotide
caaaaauauuugcugagug

SEQ ID NO: 1500 - RNA, 19 nt, Artificial Sequence
  Description of Artificial Sequence: Synthetic oligonucleotide
gaaugaacaaaugaauaaa

SEQ ID NO: 1501 - RNA, 19 nt, Artificial Sequence
  Description of Artificial Sequence: Synthetic oligonucleotide
augcauaauaaauaauuaa

SEQ ID NO: 1502 - RNA, 19 nt, Artificial Sequence
  Description of Artificial Sequence: Synthetic oligonucleotide
accaccaauccaacaucca

SEQ ID NO: 1503 - RNA, 19 nt, Artificial Sequence
  Description of Artificial Sequence: Synthetic oligonucleotide
caccaauccaacauccaga

SEQ ID NO: 1504 - RNA, 25 nt, Artificial Sequence
  Description of Artificial Sequence: Synthetic oligonucleotide
ccccggcgcagcgcggccgcagcag

SEQ ID NO: 1505 - RNA, 25 nt, Artificial Sequence
  Description of Artificial Sequence: Synthetic oligonucleotide
gccuccgccccccgcacggugugag

SEQ ID NO: 1506 - RNA, 25 nt, Artificial Sequence
  Description of Artificial Sequence: Synthetic oligonucleotide
gcgcccgacgcggccgaggcggccg

SEQ ID NO: 1507 - RNA, 25 nt, Artificial Sequence
  Description of Artificial Sequence: Synthetic oligonucleotide
ggagucccgagcuagccccggcggc

SEQ ID NO: 1508 - RNA, 25 nt, Artificial Sequence
  Description of Artificial Sequence: Synthetic oligonucleotide
ccgccgccgcccagaccggacgaca

SEQ ID NO: 1509 - RNA, 25 nt, Artificial Sequence
  Description of Artificial Sequence: Synthetic oligonucleotide
aggccaccucgucggcguccgcccg

SEQ ID NO: 1510 - RNA, 25 nt, Artificial Sequence
  Description of Artificial Sequence: Synthetic oligonucleotide
gaguccccgccucgccgccaacgcc

SEQ ID NO: 1511 - RNA, 25 nt, Artificial Sequence
  Description of Artificial Sequence: Synthetic oligonucleotide
cacaaccaccgcgcacggcccccug

SEQ ID NO: 1512 - RNA, 25 nt, Artificial Sequence
  Description of Artificial Sequence: Synthetic oligonucleotide
gacuccguccaguauugaucgggag

SEQ ID NO: 1513 - RNA, 25 nt, Artificial Sequence
  Description of Artificial Sequence: Synthetic oligonucleotide
gagccggagcgagcucuucggggag

SEQ ID NO: 1514 - RNA, 25 nt, Artificial Sequence
  Description of Artificial Sequence: Synthetic oligonucleotide
gcagcgaugcgacccuccgggacgg

SEQ ID NO: 1515 - RNA, 25 nt, Artificial Sequence
  Description of Artificial Sequence: Synthetic oligonucleotide
gccggggcagcgcuccuggcgcugc

SEQ ID NO: 1516 - RNA, 25 nt, Artificial Sequence
  Description of Artificial Sequence: Synthetic oligonucleotide
cuggcugcgcucugcccggcgaguc

SEQ ID NO: 1517 - RNA, 25 nt, Artificial Sequence
  Description of Artificial Sequence: Synthetic oligonucleotide
cgggcucuggaggaaaagaaaguuu

SEQ ID NO: 1518 - RNA, 25 nt, Artificial Sequence
  Description of Artificial Sequence: Synthetic oligonucleotide
ugccaaggcacgaguaacaagcuca

SEQ ID NO: 1519 - RNA, 25 nt, Artificial Sequence
  Description of Artificial Sequence: Synthetic oligonucleotide
acgcaguugggcacuuuugaagauc

SEQ ID NO: 1520 - RNA, 25 nt, Artificial Sequence
  Description of Artificial Sequence: Synthetic oligonucleotide
cauuuucucagccuccagaggaugu

SEQ ID NO: 1521 - RNA, 25 nt, Artificial Sequence
  Description of Artificial Sequence: Synthetic oligonucleotide
uucaauaacugugaggugguccuug

SEQ ID NO: 1522 - RNA, 25 nt, Artificial Sequence
  Description of Artificial Sequence: Synthetic oligonucleotide
gggaauuuggaaauuaccuaugugc

SEQ ID NO: 1523 - RNA, 25 nt, Artificial Sequence
  Description of Artificial Sequence: Synthetic oligonucleotide
cagaggaauuaugaucuuuccuucu

SEQ ID NO: 1524 - RNA, 25 nt, Artificial Sequence
  Description of Artificial Sequence: Synthetic oligonucleotide
uuaaagaccauccaggagguggcug

SEQ ID NO: 1525 - RNA, 25 nt, Artificial Sequence
  Description of Artificial Sequence: Synthetic oligonucleotide
gguuauguccucauugcccucaaca

SEQ ID NO: 1526 - RNA, 25 nt, Artificial Sequence
  Description of Artificial Sequence: Synthetic oligonucleotide
acaguggagcgaauuccuuuggaaa

SEQ ID NO: 1527 - RNA, 25 nt, Artificial Sequence
  Description of Artificial Sequence: Synthetic oligonucleotide
aaccugcagaucaucagaggaaaua

SEQ ID NO: 1528 - RNA, 25 nt, Artificial Sequence
  Description of Artificial Sequence: Synthetic oligonucleotide
auguacuacgaaaauuccuaugccu

SEQ ID NO: 1529 - RNA, 25 nt, Artificial Sequence
  Description of Artificial Sequence: Synthetic oligonucleotide
uuagcagucuuaucuaacuaugaug

SEQ ID NO: 1530 - RNA, 25 nt, Artificial Sequence
  Description of Artificial Sequence: Synthetic oligonucleotide
gcaaauaaaaccggacugaaggagc

SEQ ID NO: 1531 - RNA, 25 nt, Artificial Sequence
  Description of Artificial Sequence: Synthetic oligonucleotide
cugcccaugagaaauuuacaggaaa

SEQ ID NO: 1532 - RNA, 25 nt, Artificial Sequence
  Description of Artificial Sequence: Synthetic oligonucleotide
auccugcauggcgccgugcgguuca

SEQ ID NO: 1533 - RNA, 25 nt, Artificial Sequence
  Description of Artificial Sequence: Synthetic oligonucleotide
agcaacaacccugcccugugcaacg

SEQ ID NO: 1534 - RNA, 25 nt, Artificial Sequence
  Description of Artificial Sequence: Synthetic oligonucleotide
guggagagcauccaguggcgggaca

SEQ ID NO: 1535 - RNA, 25 nt, Artificial Sequence
  Description of Artificial Sequence: Synthetic oligonucleotide
auagucagcagugacuuucucagca

SEQ ID NO: 1536 - RNA, 25 nt, Artificial Sequence
  Description of Artificial Sequence: Synthetic oligonucleotide
aacaugucgauggacuuccagaacc

SEQ ID NO: 1537 - RNA, 25 nt, Artificial Sequence
  Description of Artificial Sequence: Synthetic oligonucleotide
caccugggcagcugccaaaagugug

SEQ ID NO: 1538 - RNA, 25 nt, Artificial Sequence
  Description of Artificial Sequence: Synthetic oligonucleotide
gauccaagcugucccaaugggagcu

SEQ ID NO: 1539 - RNA, 25 nt, Artificial Sequence
  Description of Artificial Sequence: Synthetic oligonucleotide
ugcuggggugcaggagaggagaacu

SEQ ID NO: 1540 - RNA, 25 nt, Artificial Sequence
  Description of Artificial Sequence: Synthetic oligonucleotide
ugccagaaacugaccaaaaucaucu

SEQ ID NO: 1541 - RNA, 25 nt, Artificial Sequence
  Description of Artificial Sequence: Synthetic oligonucleotide
ugugcccagcagugcuccgggcgcu

SEQ ID NO: 1542 - RNA, 25 nt, Artificial Sequence
  Description of Artificial Sequence: Synthetic oligonucleotide
ugccguggcaagucccccagugacu

SEQ ID NO: 1543 - RNA, 25 nt, Artificial Sequence
  Description of Artificial Sequence: Synthetic oligonucleotide
ugcugccacaaccagugugcugcag

SEQ ID NO: 1544 - RNA, 25 nt, Artificial Sequence
  Description of Artificial Sequence: Synthetic oligonucleotide
ggcugcacaggcccccgggagagcg

SEQ ID NO: 1545 - RNA, 25 nt, Artificial Sequence
  Description of Artificial Sequence: Synthetic oligonucleotide
gacugccuggucugccgcaaauucc

SEQ ID NO: 1546 - RNA, 25 nt, Artificial Sequence
  Description of Artificial Sequence: Synthetic oligonucleotide
cgagacgaagccacgugcaaggaca

SEQ ID NO: 1547 - RNA, 25 nt, Artificial Sequence
  Description of Artificial Sequence: Synthetic oligonucleotide
accugccccccacucaugcucuaca

SEQ ID NO: 1548 - RNA, 25 nt, Artificial Sequence
  Description of Artificial Sequence: Synthetic oligonucleotide
aaccccaccacguaccagauggaug

SEQ ID NO: 1549 - RNA, 25 nt, Artificial Sequence
  Description of Artificial Sequence: Synthetic oligonucleotide
gugaaccccgagggcaaauacagcu

SEQ ID NO: 1550 - RNA, 25 nt, Artificial Sequence
  Description of Artificial Sequence: Synthetic oligonucleotide
uuuggugccaccugcgugaagaagu

SEQ ID NO: 1551 - RNA, 25 nt, Artificial Sequence
  Description of Artificial Sequence: Synthetic oligonucleotide
uguccccguaauuauguggugacag

SEQ ID NO: 1552 - RNA, 25 nt, Artificial Sequence
  Description of Artificial Sequence: Synthetic oligonucleotide
gaucacggcucgugcguccgagccu

SEQ ID NO: 1553 - RNA, 25 nt, Artificial Sequence
  Description of Artificial Sequence: Synthetic oligonucleotide
uguggggccgacagcuaugagaugg

SEQ ID NO: 1554 - RNA, 25 nt, Artificial Sequence
  Description of Artificial Sequence: Synthetic oligonucleotide
gaggaagacggcguccgcaagugua

SEQ ID NO: 1555 - RNA, 25 nt, Artificial Sequence
  Description of Artificial Sequence: Synthetic oligonucleotide
aagaagugcgaagggccuugccgca

SEQ ID NO: 1556 - RNA, 25 nt, Artificial Sequence
  Description of Artificial Sequence: Synthetic oligonucleotide
aaaguguguaacggaauagguauug

SEQ ID NO: 1557 - RNA, 25 nt, Artificial Sequence
  Description of Artificial Sequence: Synthetic oligonucleotide
ggugaauuuaaagacucacucucca

SEQ ID NO: 1558 - RNA, 25 nt, Artificial Sequence
  Description of Artificial Sequence: Synthetic oligonucleotide
auaaaugcuacgaauauuaaacacu

SEQ ID NO: 1559 - RNA, 25 nt, Artificial Sequence
  Description of Artificial Sequence: Synthetic oligonucleotide
uucaaaaacugcaccuccaucagug

SEQ ID NO: 1560 - RNA, 25 nt, Artificial Sequence
  Description of Artificial Sequence: Synthetic oligonucleotide
ggcgaucuccacauccugccggugg

SEQ ID NO: 1561 - RNA, 25 nt, Artificial Sequence
  Description of Artificial Sequence: Synthetic oligonucleotide
gcauuuaggggugacuccuucacac

SEQ ID NO: 1562 - RNA, 25 nt, Artificial Sequence
  Description of Artificial Sequence: Synthetic oligonucleotide
cauacuccuccucuggauccacagg

SEQ ID NO: 1563 - RNA, 25 nt, Artificial Sequence
  Description of Artificial Sequence: Synthetic oligonucleotide
gaacuggauauucugaaaaccguaa

SEQ ID NO: 1564 - RNA, 25 nt, Artificial Sequence
  Description of Artificial Sequence: Synthetic oligonucleotide
aaggaaaucacagguuugagcugaa

SEQ ID NO: 1565 - RNA, 25 nt, Artificial Sequence
  Description of Artificial Sequence: Synthetic oligonucleotide
auuaucacaugaauauaaaugggaa

SEQ ID NO: 1566 - RNA, 25 nt, Artificial Sequence
  Description of Artificial Sequence: Synthetic oligonucleotide
aaucaguguuuuagagagagaacuu

SEQ ID NO: 1567 - RNA, 25 nt, Artificial Sequence
  Description of Artificial Sequence: Synthetic oligonucleotide
uuucgacauauuuccuguucccuug

SEQ ID NO: 1568 - RNA, 25 nt, Artificial Sequence
  Description of Artificial Sequence: Synthetic oligonucleotide
ggaauaaaaacauuucuucugaaau

SEQ ID NO: 1569 - RNA, 25 nt, Artificial Sequence
  Description of Artificial Sequence: Synthetic oligonucleotide
aaggaaaucacaggguuuuugcuga

SEQ ID NO: 1570 - RNA, 25 nt, Artificial Sequence
  Description of Artificial Sequence: Synthetic oligonucleotide
auucaggcuuggccugaaaacagga

SEQ ID NO: 1571 - RNA, 25 nt, Artificial Sequence
  Description of Artificial Sequence: Synthetic oligonucleotide
acggaccuccaugccuuugagaacc

SEQ ID NO: 1572 - RNA, 25 nt, Artificial Sequence
  Description of Artificial Sequence: Synthetic oligonucleotide
cuagaaaucauacgcggcaggacca

SEQ ID NO: 1573 - RNA, 25 nt, Artificial Sequence
  Description of Artificial Sequence: Synthetic oligonucleotide
aagcaacauggucaguuuucucuug

SEQ ID NO: 1574 - RNA, 25 nt, Artificial Sequence
  Description of Artificial Sequence: Synthetic oligonucleotide
gcagucgucagccugaacauaacau

SEQ ID NO: 1575 - RNA, 25 nt, Artificial Sequence
  Description of Artificial Sequence: Synthetic oligonucleotide
uccuugggauuacgcucccucaagg

SEQ ID NO: 1576 - RNA, 25 nt, Artificial Sequence
  Description of Artificial Sequence: Synthetic oligonucleotide
gagauaagugauggagaugugauaa

SEQ ID NO: 1577 - RNA, 25 nt, Artificial Sequence
  Description of Artificial Sequence: Synthetic oligonucleotide
auuucaggaaacaaaaauuugugcu

SEQ ID NO: 1578 - RNA, 25 nt, Artificial Sequence
  Description of Artificial Sequence: Synthetic oligonucleotide
uaugcaaauacaauaaacuggaaaa

SEQ ID NO: 1579 - RNA, 25 nt, Artificial Sequence
  Description of Artificial Sequence: Synthetic oligonucleotide
aaacuguuugggaccuccggucaga

SEQ ID NO: 1580 - RNA, 25 nt, Artificial Sequence
  Description of Artificial Sequence: Synthetic oligonucleotide
aaaaccaaaauuauaagcaacagag

SEQ ID NO: 1581 - RNA, 25 nt, Artificial Sequence
  Description of Artificial Sequence: Synthetic oligonucleotide
ggugaaaacagcugcaaggccacag

SEQ ID NO: 1582 - RNA, 25 nt, Artificial Sequence
  Description of Artificial Sequence: Synthetic oligonucleotide
ggccaggucugccaugccuugugcu

SEQ ID NO: 1583 - RNA, 25 nt, Artificial Sequence
  Description of Artificial Sequence: Synthetic oligonucleotide
ucccccgagggcugcuggggcccgg

SEQ ID NO: 1584 - RNA, 25 nt, Artificial Sequence
  Description of Artificial Sequence: Synthetic oligonucleotide
gagcccagggacugcgucucuugcc

SEQ ID NO: 1585 - RNA, 25 nt, Artificial Sequence
  Description of Artificial Sequence: Synthetic oligonucleotide
cggaaugucagccgaggcagggaau

SEQ ID NO: 1586 - RNA, 25 nt, Artificial Sequence
  Description of Artificial Sequence: Synthetic oligonucleotide
ugcguggacaagugcaaccuucugg

SEQ ID NO: 1587 - RNA, 25 nt, Artificial Sequence
  Description of Artificial Sequence: Synthetic oligonucleotide
gagggugagccaagggaguuugugg

SEQ ID NO: 1588 - RNA, 25 nt, Artificial Sequence
  Description of Artificial Sequence: Synthetic oligonucleotide
gagaacucugagugcauacagugcc

SEQ ID NO: 1589 - RNA, 25 nt, Artificial Sequence
  Description of Artificial Sequence: Synthetic oligonucleotide
cacccagagugccugccucaggcca

SEQ ID NO: 1590 - RNA, 25 nt, Artificial Sequence
  Description of Artificial Sequence: Synthetic oligonucleotide
augaacaucaccugcacaggacggg

SEQ ID NO: 1591 - RNA, 25 nt, Artificial Sequence
  Description of Artificial Sequence: Synthetic oligonucleotide
ggaccagacaacuguauccagugug

SEQ ID NO: 1592 - RNA, 25 nt, Artificial Sequence
  Description of Artificial Sequence: Synthetic oligonucleotide
gcccacuacauugacggcccccacu

SEQ ID NO: 1593 - RNA, 25 nt, Artificial Sequence
  Description of Artificial Sequence: Synthetic oligonucleotide
ugcgucaagaccugcccggcaggag

SEQ ID NO: 1594 - RNA, 25 nt, Artificial Sequence
  Description of Artificial Sequence: Synthetic oligonucleotide
gucaugggagaaaacaacacccugg

SEQ ID NO: 1595 - RNA, 25 nt, Artificial Sequence
  Description of Artificial Sequence: Synthetic oligonucleotide
gucuggaaguacgcagacgccggcc

SEQ ID NO: 1596 - RNA, 25 nt, Artificial Sequence
  Description of Artificial Sequence: Synthetic oligonucleotide
caugugugccaccugugccauccaa

SEQ ID NO: 1597 - RNA, 25 nt, Artificial Sequence
  Description of Artificial Sequence: Synthetic oligonucleotide
aacugcaccuacggguccuaauaaa

SEQ ID NO: 1598 - RNA, 25 nt, Artificial Sequence
  Description of Artificial Sequence: Synthetic oligonucleotide
aucuucacugucugacuuuagucuc

SEQ ID NO: 1599 - RNA, 25 nt, Artificial Sequence
  Description of Artificial Sequence: Synthetic oligonucleotide
cccacuaaaacugcauuuccuuucu

SEQ ID NO: 1600 - RNA, 25 nt, Artificial Sequence
  Description of Artificial Sequence: Synthetic oligonucleotide
uacaauuucaauuucucccuuugcu

SEQ ID NO: 1601 - RNA, 25 nt, Artificial Sequence
  Description of Artificial Sequence: Synthetic oligonucleotide
uucaaauaaaguccugacacuauuc

SEQ ID NO: 1602 - RNA, 25 nt, Artificial Sequence
  Description of Artificial Sequence: Synthetic oligonucleotide
uaaaguccugacacuauucauuuga

SEQ ID NO: 1603 - RNA, 25 nt, Artificial Sequence
  Description of Artificial Sequence: Synthetic oligonucleotide
aacugcaccuacggaugcacugggc

SEQ ID NO: 1604 - RNA, 25 nt, Artificial Sequence
  Description of Artificial Sequence: Synthetic oligonucleotide
ccaggucuugaaggcuguccaacga

SEQ ID NO: 1605 - RNA, 25 nt, Artificial Sequence
  Description of Artificial Sequence: Synthetic oligonucleotide
aaugggccuaagaucccguccaucg

SEQ ID NO: 1606 - RNA, 25 nt, Artificial Sequence
  Description of Artificial Sequence: Synthetic oligonucleotide
gccacugggauggugggggcccucc

SEQ ID NO: 1607 - RNA, 25 nt, Artificial Sequence
  Description of Artificial Sequence: Synthetic oligonucleotide
cucuugcugcuggugguggcccugg

SEQ ID NO: 1608 - RNA, 25 nt, Artificial Sequence
  Description of Artificial Sequence: Synthetic oligonucleotide
gggaucggccucuucaugcgaaggc

SEQ ID NO: 1609 - RNA, 25 nt, Artificial Sequence
  Description of Artificial Sequence: Synthetic oligonucleotide
cgccacaucguucggaagcgcacgc

SEQ ID NO: 1610 - RNA, 25 nt, Artificial Sequence
  Description of Artificial Sequence: Synthetic oligonucleotide
cugcggaggcugcugcaggagaggg

SEQ ID NO: 1611 - RNA, 25 nt, Artificial Sequence
  Description of Artificial Sequence: Synthetic oligonucleotide
gagcuuguggagccucuuacaccca

SEQ ID NO: 1612 - RNA, 25 nt, Artificial Sequence
  Description of Artificial Sequence: Synthetic oligonucleotide
aguggagaagcucccaaccaagcuc

SEQ ID NO: 1613 - RNA, 25 nt, Artificial Sequence
  Description of Artificial Sequence: Synthetic oligonucleotide
cucuugaggaucuugaaggaaacug

SEQ ID NO: 1614 - RNA, 25 nt, Artificial Sequence
  Description of Artificial Sequence: Synthetic oligonucleotide
gaauucaaaaagaucaaagugcugg

SEQ ID NO: 1615 - RNA, 25 nt, Artificial Sequence
  Description of Artificial Sequence: Synthetic oligonucleotide
ggcuccggugcguucggcacggugu

SEQ ID NO: 1616 - RNA, 25 nt, Artificial Sequence
  Description of Artificial Sequence: Synthetic oligonucleotide
uauaagggacucuggaucccagaag

SEQ ID NO: 1617 - RNA, 25 nt, Artificial Sequence
  Description of Artificial Sequence: Synthetic oligonucleotide
ggugagaaaguuaaaauucccgucg

SEQ ID NO: 1618 - RNA, 25 nt, Artificial Sequence
  Description of Artificial Sequence: Synthetic oligonucleotide
gcuaucaaggaauuaagagaagcaa

SEQ ID NO: 1619 - RNA, 25 nt, Artificial Sequence
  Description of Artificial Sequence: Synthetic oligonucleotide
acaucuccgaaagccaacaaggaaa

SEQ ID NO: 1620 - RNA, 25 nt, Artificial Sequence
  Description of Artificial Sequence: Synthetic oligonucleotide
auccucgaugaagccuacgugaugg

SEQ ID NO: 1621 - RNA, 25 nt, Artificial Sequence
  Description of Artificial Sequence: Synthetic oligonucleotide
gccagcguggacaacccccacgugu

SEQ ID NO: 1622 - RNA, 25 nt, Artificial Sequence
  Description of Artificial Sequence: Synthetic oligonucleotide
ugccgccugcugggcaucugccuca

SEQ ID NO: 1623 - RNA, 25 nt, Artificial Sequence
  Description of Artificial Sequence: Synthetic oligonucleotide
accuccaccgugcagcucaucacgc

SEQ ID NO: 1624 - RNA, 25 nt, Artificial Sequence
  Description of Artificial Sequence: Synthetic oligonucleotide
cagcucaugcccuucggcugccucc

SEQ ID NO: 1625 - RNA, 25 nt, Artificial Sequence
  Description of Artificial Sequence: Synthetic oligonucleotide
cuggacuauguccgggaacacaaag

SEQ ID NO: 1626 - RNA, 25 nt, Artificial Sequence
  Description of Artificial Sequence: Synthetic oligonucleotide
gacaauauuggcucccaguaccugc

SEQ ID NO: 1627 - RNA, 25 nt, Artificial Sequence
  Description of Artificial Sequence: Synthetic oligonucleotide
cucaacuggugugugcagaucgcaa

SEQ ID NO: 1628 - RNA, 25 nt, Artificial Sequence
  Description of Artificial Sequence: Synthetic oligonucleotide
aagggcaugaacuacuuggaggacc

SEQ ID NO: 1629 - RNA, 25 nt, Artificial Sequence
  Description of Artificial Sequence: Synthetic oligonucleotide
cgucgcuuggugcaccgcgaccugg

SEQ ID NO: 1630 - RNA, 25 nt, Artificial Sequence
  Description of Artificial Sequence: Synthetic oligonucleotide
gcagccaggaacguacuggugaaaa

SEQ ID NO: 1631 - RNA, 25 nt, Artificial Sequence
  Description of Artificial Sequence: Synthetic oligonucleotide
acaccgcagcaugucaagaucacag

SEQ ID NO: 1632 - RNA, 25 nt, Artificial Sequence
  Description of Artificial Sequence: Synthetic oligonucleotide
gauuuugggcuggccaaacugcugg

SEQ ID NO: 1633 - RNA, 25 nt, Artificial Sequence
  Description of Artificial Sequence: Synthetic oligonucleotide
ggugcggaagagaaagaauaccaug

SEQ ID NO: 1634 - RNA, 25 nt, Artificial Sequence
  Description of Artificial Sequence: Synthetic oligonucleotide
gcagaaggaggcaaagugccuauca

SEQ ID NO: 1635 - RNA, 25 nt, Artificial Sequence
  Description of Artificial Sequence: Synthetic oligonucleotide
aaguggauggcauuggaaucaauuu

SEQ ID NO: 1636 - RNA, 25 nt, Artificial Sequence
  Description of Artificial Sequence: Synthetic oligonucleotide
uuacacagaaucuauacccaccaga

SEQ ID NO: 1637 - RNA, 25 nt, Artificial Sequence
  Description of Artificial Sequence: Synthetic oligonucleotide
agugaugucuggagcuacgggguga

SEQ ID NO: 1638 - RNA, 25 nt, Artificial Sequence
  Description of Artificial Sequence: Synthetic oligonucleotide
accguuugggaguugaugaccuuug

SEQ ID NO: 1639 - RNA, 25 nt, Artificial Sequence
  Description of Artificial Sequence: Synthetic oligonucleotide
ggauccaagccauaugacggaaucc

SEQ ID NO: 1640 - RNA, 25 nt, Artificial Sequence
  Description of Artificial Sequence: Synthetic oligonucleotide
ccugccagcgagaucuccuccaucc

SEQ ID NO: 1641 - RNA, 25 nt, Artificial Sequence
  Description of Artificial Sequence: Synthetic oligonucleotide
cuggagaaaggagaacgccucccuc

SEQ ID NO: 1642 - RNA, 25 nt, Artificial Sequence
  Description of Artificial Sequence: Synthetic oligonucleotide
cagccacccauauguaccaucgaug

SEQ ID NO: 1643 - RNA, 25 nt, Artificial Sequence
  Description of Artificial Sequence: Synthetic oligonucleotide
gucuacaugaucauggucaagugcu

SEQ ID NO: 1644 - RNA, 25 nt, Artificial Sequence
  Description of Artificial Sequence: Synthetic oligonucleotide
uggaugauagacgcagauagucgcc

SEQ ID NO: 1645 - RNA, 25 nt, Artificial Sequence
  Description of Artificial Sequence: Synthetic oligonucleotide
ccaaaguuccgugaguugaucaucg

SEQ ID NO: 1646 - RNA, 25 nt, Artificial Sequence
  Description of Artificial Sequence: Synthetic oligonucleotide
gaauucuccaaaauggcccgagacc

SEQ ID NO: 1647 - RNA, 25 nt, Artificial Sequence
  Description of Artificial Sequence: Synthetic oligonucleotide
ccccagcgcuaccuugucauucagg

SEQ ID NO: 1648 - RNA, 25 nt, Artificial Sequence
  Description of Artificial Sequence: Synthetic oligonucleotide
ggggaugaaagaaugcauuugccaa

SEQ ID NO: 1649 - RNA, 25 nt, Artificial Sequence
  Description of Artificial Sequence: Synthetic oligonucleotide
aguccuacagacuccaacuucuacc

SEQ ID NO: 1650 - RNA, 25 nt, Artificial Sequence
  Description of Artificial Sequence: Synthetic oligonucleotide
cgugcccugauggaugaagaagaca

SEQ ID NO: 1651 - RNA, 25 nt, Artificial Sequence
  Description of Artificial Sequence: Synthetic oligonucleotide
auggacgacgugguggaugccgacg

SEQ ID NO: 1652 - RNA, 25 nt, Artificial Sequence
  Description of Artificial Sequence: Synthetic oligonucleotide
gaguaccucaucccacagcagggcu

SEQ ID NO: 1653 - RNA, 25 nt, Artificial Sequence
  Description of Artificial Sequence: Synthetic oligonucleotide
uucuucagcagccccuccacgucac

SEQ ID NO: 1654 - RNA, 25 nt, Artificial Sequence
  Description of Artificial Sequence: Synthetic oligonucleotide
cggacuccccuccugagcucucuga

SEQ ID NO: 1655 - RNA, 25 nt, Artificial Sequence
  Description of Artificial Sequence: Synthetic oligonucleotide
agugcaaccagcaacaauuccaccg

SEQ ID NO: 1656 - RNA, 25 nt, Artificial Sequence
  Description of Artificial Sequence: Synthetic oligonucleotide
guggcuugcauugauagaaaugggc

SEQ ID NO: 1657 - RNA, 25 nt, Artificial Sequence
  Description of Artificial Sequence: Synthetic oligonucleotide
cugcaaagcugucccaucaaggaag

SEQ ID NO: 1658 - RNA, 25 nt, Artificial Sequence
  Description of Artificial Sequence: Synthetic oligonucleotide
gacagcuucuugcagcgauacagcu

SEQ ID NO: 1659 - RNA, 25 nt, Artificial Sequence
  Description of Artificial Sequence: Synthetic oligonucleotide
ucagaccccacaggcgccuugacug

SEQ ID NO: 1660 - RNA, 25 nt, Artificial Sequence
  Description of Artificial Sequence: Synthetic oligonucleotide
gaggacagcauagacgacaccuucc

SEQ ID NO: 1661 - RNA, 25 nt, Artificial Sequence
  Description of Artificial Sequence: Synthetic oligonucleotide
cucccagugccugaauacauaaacc

SEQ ID NO: 1662 - RNA, 25 nt, Artificial Sequence
  Description of Artificial Sequence: Synthetic oligonucleotide
caguccguucccaaaaggcccgcug

SEQ ID NO: 1663 - RNA, 25 nt, Artificial Sequence
  Description of Artificial Sequence: Synthetic oligonucleotide
ggcucugugcagaauccugucuauc

SEQ ID NO: 1664 - RNA, 25 nt, Artificial Sequence
  Description of Artificial Sequence: Synthetic oligonucleotide
cacaaucagccucugaaccccgcgc

SEQ ID NO: 1665 - RNA, 25 nt, Artificial Sequence
  Description of Artificial Sequence: Synthetic oligonucleotide
cccagcagagacccacacuaccagg

SEQ ID NO: 1666 - RNA, 25 nt, Artificial Sequence
  Description of Artificial Sequence: Synthetic oligonucleotide
gacccccacagcacugcagugggca

SEQ ID NO: 1667 - RNA, 25 nt, Artificial Sequence
  Description of Artificial Sequence: Synthetic oligonucleotide
aaccccgaguaucucaacacugucc

SEQ ID NO: 1668 - RNA, 25 nt, Artificial Sequence
  Description of Artificial Sequence: Synthetic oligonucleotide
cagcccaccugugucaacagcacau

SEQ ID NO: 1669 - RNA, 25 nt, Artificial Sequence
  Description of Artificial Sequence: Synthetic oligonucleotide
uucgacagcccugcccacugggccc

SEQ ID NO: 1670 - RNA, 25 nt, Artificial Sequence
  Description of Artificial Sequence: Synthetic oligonucleotide
cagaaaggcagccaccaaauuagcc

SEQ ID NO: 1671 - RNA, 25 nt, Artificial Sequence
  Description of Artificial Sequence: Synthetic oligonucleotide
cuggacaacccugacuaccagcagg

SEQ ID NO: 1672 - RNA, 25 nt, Artificial Sequence
  Description of Artificial Sequence: Synthetic oligonucleotide
gacuucuuucccaaggaagccaagc

SEQ ID NO: 1673 - RNA, 25 nt, Artificial Sequence
  Description of Artificial Sequence: Synthetic oligonucleotide
ccaaauggcaucuuuaagggcucca

SEQ ID NO: 1674 - RNA, 25 nt, Artificial Sequence
  Description of Artificial Sequence: Synthetic oligonucleotide
acagcugaaaaugcagaauaccuaa

SEQ ID NO: 1675 - RNA, 25 nt, Artificial Sequence
  Description of Artificial Sequence: Synthetic oligonucleotide
agggucgcgccacaaagcagugaau

SEQ ID NO: 1676 - RNA, 25 nt, Artificial Sequence
  Description of Artificial Sequence: Synthetic oligonucleotide
uuuauuggagcaugaccacggagga

SEQ ID NO: 1677 - RNA, 25 nt, Artificial Sequence
  Description of Artificial Sequence: Synthetic oligonucleotide
auaguaugagcccuaaaaauccaga

SEQ ID NO: 1678 - RNA, 25 nt, Artificial Sequence
  Description of Artificial Sequence: Synthetic oligonucleotide
acucuuucgauacccaggaccaagc

SEQ ID NO: 1679 - RNA, 25 nt, Artificial Sequence
  Description of Artificial Sequence: Synthetic oligonucleotide
ccacagcagguccuccaucccaaca

SEQ ID NO: 1680 - RNA, 25 nt, Artificial Sequence
  Description of Artificial Sequence: Synthetic oligonucleotide
agccaugcccgcauuagcucuuaga

SEQ ID NO: 1681 - RNA, 25 nt, Artificial Sequence
  Description of Artificial Sequence: Synthetic oligonucleotide
acccacagacugguuuugcaacguu

SEQ ID NO: 1682 - RNA, 25 nt, Artificial Sequence
  Description of Artificial Sequence: Synthetic oligonucleotide
uuacaccgacuagccaggaaguacu

SEQ ID NO: 1683 - RNA, 25 nt, Artificial Sequence
  Description of Artificial Sequence: Synthetic oligonucleotide
uuccaccucgggcacauuuugggaa

SEQ ID NO: 1684 - RNA, 25 nt, Artificial Sequence
  Description of Artificial Sequence: Synthetic oligonucleotide
aguugcauuccuuugucuucaaacu

SEQ ID NO: 1685 - RNA, 25 nt, Artificial Sequence
  Description of Artificial Sequence: Synthetic oligonucleotide
ugugaagcauuuacagaaacgcauc

SEQ ID NO: 1686 - RNA, 25 nt, Artificial Sequence
  Description of Artificial Sequence: Synthetic oligonucleotide
ccagcaagaauauugucccuuugag

SEQ ID NO: 1687 - RNA, 25 nt, Artificial Sequence
  Description of Artificial Sequence: Synthetic oligonucleotide
gcagaaauuuaucuuucaaagaggu

SEQ ID NO: 1688 - RNA, 25 nt, Artificial Sequence
  Description of Artificial Sequence: Synthetic oligonucleotide
uaugugaggauuuuuauugauuggg

SEQ ID NO: 1689 - RNA, 25 nt, Artificial Sequence
  Description of Artificial Sequence: Synthetic oligonucleotide
ggaucuuggaguuuuucauugucgc

SEQ ID NO: 1690 - RNA, 25 nt, Artificial Sequence
  Description of Artificial Sequence: Synthetic oligonucleotide
cuauugauuuuuacuucaaugggcu

SEQ ID NO: 1691 - RNA, 25 nt, Artificial Sequence
  Description of Artificial Sequence: Synthetic oligonucleotide
ucuuccaacaaggaagaagcuugcu

SEQ ID NO: 1692 - RNA, 25 nt, Artificial Sequence
  Description of Artificial Sequence: Synthetic oligonucleotide
ugguagcacuugcuacccugaguuc

SEQ ID NO: 1693 - RNA, 25 nt, Artificial Sequence
  Description of Artificial Sequence: Synthetic oligonucleotide
cauccaggcccaacugugagcaagg

SEQ ID NO: 1694 - RNA, 25 nt, Artificial Sequence
  Description of Artificial Sequence: Synthetic oligonucleotide
gagcacaagccacaagucuuccaga

SEQ ID NO: 1695 - RNA, 25 nt, Artificial Sequence
  Description of Artificial Sequence: Synthetic oligonucleotide
aggaugcuugauuccagugguucug

SEQ ID NO: 1696 - RNA, 25 nt, Artificial Sequence
  Description of Artificial Sequence: Synthetic oligonucleotide
gcuucaaggcuuccacugcaaaaca

SEQ ID NO: 1697 - RNA, 25 nt, Artificial Sequence
  Description of Artificial Sequence: Synthetic oligonucleotide
acuaaagauccaagaaggccuucau

SEQ ID NO: 1698 - RNA, 25 nt, Artificial Sequence
  Description of Artificial Sequence: Synthetic oligonucleotide
uggccccagcaggccggaucgguac

SEQ ID NO: 1699 - RNA, 25 nt, Artificial Sequence
  Description of Artificial Sequence: Synthetic oligonucleotide
cuguaucaagucauggcagguacag

SEQ ID NO: 1700 - RNA, 25 nt, Artificial Sequence
  Description of Artificial Sequence: Synthetic oligonucleotide
guaggauaagccacucugucccuuc

SEQ ID NO: 1701 - RNA, 25 nt, Artificial Sequence
  Description of Artificial Sequence: Synthetic oligonucleotide
ccugggcaaagaagaaacggagggg

SEQ ID NO: 1702 - RNA, 25 nt, Artificial Sequence
  Description of Artificial Sequence: Synthetic oligonucleotide
gauggaauucuuccuuagacuuacu

SEQ ID NO: 1703 - RNA, 25 nt, Artificial Sequence
  Description of Artificial Sequence: Synthetic oligonucleotide
uuuuguaaaaauguccccacgguac

SEQ ID NO: 1704 - RNA, 25 nt, Artificial Sequence
  Description of Artificial Sequence: Synthetic oligonucleotide
cuuacuccccacugauggaccagug

SEQ ID NO: 1705 - RNA, 25 nt, Artificial Sequence
  Description of Artificial Sequence: Synthetic oligonucleotide
gguuuccagucaugagcguuagacu

SEQ ID NO: 1706 - RNA, 25 nt, Artificial Sequence
  Description of Artificial Sequence: Synthetic oligonucleotide
ugacuuguuugucuuccauuccauu

SEQ ID NO: 1707 - RNA, 25 nt, Artificial Sequence
  Description of Artificial Sequence: Synthetic oligonucleotide
uguuuugaaacucaguaugcugccc

SEQ ID NO: 1708 - RNA, 25 nt, Artificial Sequence
  Description of Artificial Sequence: Synthetic oligonucleotide
ccugucuugcugucaugaaaucagc

SEQ ID NO: 1709 - RNA, 25 nt, Artificial Sequence
  Description of Artificial Sequence: Synthetic oligonucleotide
caagagaggaugacacaucaaauaa

SEQ ID NO: 1710 - RNA, 25 nt, Artificial Sequence
  Description of Artificial Sequence: Synthetic oligonucleotide
auaacucggauuccagcccacauug

SEQ ID NO: 1711 - RNA, 25 nt, Artificial Sequence
  Description of Artificial Sequence: Synthetic oligonucleotide
ggauucaucagcauuuggaccaaua

SEQ ID NO: 1712 - RNA, 25 nt, Artificial Sequence
  Description of Artificial Sequence: Synthetic oligonucleotide
agcccacagcugagaauguggaaua

SEQ ID NO: 1713 - RNA, 25 nt, Artificial Sequence
  Description of Artificial Sequence: Synthetic oligonucleotide
accuaaggauagcaccgcuuuuguu

SEQ ID NO: 1714 - RNA, 25 nt, Artificial Sequence
  Description of Artificial Sequence: Synthetic oligonucleotide
ucucgcaaaaacguaucuccuaauu

SEQ ID NO: 1715 - RNA, 25 nt, Artificial Sequence
  Description of Artificial Sequence: Synthetic oligonucleotide
uugaggcucagaugaaaugcaucag

SEQ ID NO: 1716 - RNA, 25 nt, Artificial Sequence
  Description of Artificial Sequence: Synthetic oligonucleotide
gguccuuuggggcauagaucagaag

SEQ ID NO: 1717 - RNA, 25 nt, Artificial Sequence
  Description of Artificial Sequence: Synthetic oligonucleotide
gacuacaaaaaugaagcugcucuga

SEQ ID NO: 1718 - RNA, 25 nt, Artificial Sequence
  Description of Artificial Sequence: Synthetic oligonucleotide
aaaucuccuuuagccaucaccccaa

SEQ ID NO: 1719 - RNA, 25 nt, Artificial Sequence
  Description of Artificial Sequence: Synthetic oligonucleotide
accccccaaaauuaguuuguguuac

SEQ ID NO: 1720 - RNA, 25 nt, Artificial Sequence
  Description of Artificial Sequence: Synthetic oligonucleotide
cuuauggaagauaguuuucuccuuu

SEQ ID NO: 1721 - RNA, 25 nt, Artificial Sequence
  Description of Artificial Sequence: Synthetic oligonucleotide
uuacuucacuucaaaagcuuuuuac

SEQ ID NO: 1722 - RNA, 25 nt, Artificial Sequence
  Description of Artificial Sequence: Synthetic oligonucleotide
cucaaagaguauauguucccuccag

SEQ ID NO: 1723 - RNA, 25 nt, Artificial Sequence
  Description of Artificial Sequence: Synthetic oligonucleotide
ggucagcugcccccaaacccccucc

SEQ ID NO: 1724 - RNA, 25 nt, Artificial Sequence
  Description of Artificial Sequence: Synthetic oligonucleotide
cuuacgcuuugucacacaaaaagug

SEQ ID NO: 1725 - RNA, 25 nt, Artificial Sequence
  Description of Artificial Sequence: Synthetic oligonucleotide
gucucugccuugagucaucuauuca

SEQ ID NO: 1726 - RNA, 25 nt, Artificial Sequence
  Description of Artificial Sequence: Synthetic oligonucleotide
aagcacuuacagcucuggccacaac

SEQ ID NO: 1727 - RNA, 25 nt, Artificial Sequence
  Description of Artificial Sequence: Synthetic oligonucleotide
cagggcauuuuacaggugcgaauga

SEQ ID NO: 1728 - RNA, 25 nt, Artificial Sequence
  Description of Artificial Sequence: Synthetic oligonucleotide
acaguagcauuaugaguagugugga

SEQ ID NO: 1729 - RNA, 25 nt, Artificial Sequence
  Description of Artificial Sequence: Synthetic oligonucleotide
aauucagguaguaaauaugaaacua

SEQ ID NO: 1730 - RNA, 25 nt, Artificial Sequence
  Description of Artificial Sequence: Synthetic oligonucleotide
aggguuugaaauugauaaugcuuuc

SEQ ID NO: 1731 - RNA, 25 nt, Artificial Sequence
  Description of Artificial Sequence: Synthetic oligonucleotide
cacaacauuugcagauguuuuagaa

SEQ ID NO: 1732 - RNA, 25 nt, Artificial Sequence
  Description of Artificial Sequence: Synthetic oligonucleotide
aggaaaaaaguuccuuccuaaaaua

SEQ ID NO: 1733 - RNA, 25 nt, Artificial Sequence
  Description of Artificial Sequence: Synthetic oligonucleotide
aauuucucuacaauuggaagauugg

SEQ ID NO: 1734 - RNA, 25 nt, Artificial Sequence
  Description of Artificial Sequence: Synthetic oligonucleotide
gaagauucagcuaguuaggagccca

SEQ ID NO: 1735 - RNA, 25 nt, Artificial Sequence
  Description of Artificial Sequence: Synthetic oligonucleotide
accuuuuuuccuaaucugugugugc

SEQ ID NO: 1736 - RNA, 25 nt, Artificial Sequence
  Description of Artificial Sequence: Synthetic oligonucleotide
cccuguaaccugacugguuaacagc

SEQ ID NO: 1737 - RNA, 25 nt, Artificial Sequence
  Description of Artificial Sequence: Synthetic oligonucleotide
caguccuuuguaaacaguguuuuaa

SEQ ID NO: 1738 - RNA, 25 nt, Artificial Sequence
  Description of Artificial Sequence: Synthetic oligonucleotide
aacucuccuagucaauauccacccc

SEQ ID NO: 1739 - RNA, 25 nt, Artificial Sequence
  Description of Artificial Sequence: Synthetic oligonucleotide
cauccaauuuaucaaggaagaaaug

SEQ ID NO: 1740 - RNA, 25 nt, Artificial Sequence
  Description of Artificial Sequence: Synthetic oligonucleotide
gguucagaaaauauuuucagccuac

SEQ ID NO: 1741 - RNA, 25 nt, Artificial Sequence
  Description of Artificial Sequence: Synthetic oligonucleotide
caguuauguucagucacacacacau

SEQ ID NO: 1742 - RNA, 25 nt, Artificial Sequence
  Description of Artificial Sequence: Synthetic oligonucleotide
uacaaaauguuccuuuugcuuuuaa

SEQ ID NO: 1743 - RNA, 25 nt, Artificial Sequence
  Description of Artificial Sequence: Synthetic oligonucleotide
aaguaauuuuugacucccagaucag

SEQ ID NO: 1744 - RNA, 25 nt, Artificial Sequence
  Description of Artificial Sequence: Synthetic oligonucleotide
gucagagccccuacagcauuguuaa

SEQ ID NO: 1745 - RNA, 25 nt, Artificial Sequence
  Description of Artificial Sequence: Synthetic oligonucleotide
agaaaguauuugauuuuugucucaa

SEQ ID NO: 1746 - RNA, 25 nt, Artificial Sequence
  Description of Artificial Sequence: Synthetic oligonucleotide
augaaaauaaaacuauauucauuuc

SEQ ID NO: 1747 - RNA, 25 nt, Artificial Sequence
  Description of Artificial Sequence: Synthetic oligonucleotide
aacugcaccuacgggccaggaaaug

SEQ ID NO: 1748 - RNA, 25 nt, Artificial Sequence
  Description of Artificial Sequence: Synthetic oligonucleotide
gagagucucaaagccauguuauucu

SEQ ID NO: 1749 - RNA, 25 nt, Artificial Sequence
  Description of Artificial Sequence: Synthetic oligonucleotide
ugccuuuuuaaacuaucauccugua

SEQ ID NO: 1750 - RNA, 25 nt, Artificial Sequence
  Description of Artificial Sequence: Synthetic oligonucleotide
aaucaaaguaaugauggcagcgugu

SEQ ID NO: 1751 - RNA, 25 nt, Artificial Sequence
  Description of Artificial Sequence: Synthetic oligonucleotide
ucccaccagagcgggagcccagcug

SEQ ID NO: 1752 - RNA, 25 nt, Artificial Sequence
  Description of Artificial Sequence: Synthetic oligonucleotide
gcucaggagucaugcuuaggaugga

SEQ ID NO: 1753 - RNA, 25 nt, Artificial Sequence
  Description of Artificial Sequence: Synthetic oligonucleotide
aucccuucucuucugccgucagagu

SEQ ID NO: 1754 - RNA, 25 nt, Artificial Sequence
  Description of Artificial Sequence: Synthetic oligonucleotide
uuucagcuggguugggguggaugca

SEQ ID NO: 1755 - RNA, 25 nt, Artificial Sequence
  Description of Artificial Sequence: Synthetic oligonucleotide
agccaccuccaugccuggccuucug

SEQ ID NO: 1756 - RNA, 25 nt, Artificial Sequence
  Description of Artificial Sequence: Synthetic oligonucleotide
gcaucugugaucaucacggccuccu

SEQ ID NO: 1757 - RNA, 25 nt, Artificial Sequence
  Description of Artificial Sequence: Synthetic oligonucleotide
uccugccacugagccucaugccuuc

SEQ ID NO: 1758 - RNA, 25 nt, Artificial Sequence
  Description of Artificial Sequence: Synthetic oligonucleotide
cacgugucuguuccccccgcuuuuc

SEQ ID NO: 1759 - RNA, 25 nt, Artificial Sequence
  Description of Artificial Sequence: Synthetic oligonucleotide
ccuuucugccaccccugcacguggg

SEQ ID NO: 1760 - RNA, 25 nt, Artificial Sequence
  Description of Artificial Sequence: Synthetic oligonucleotide
gccgccagguucccaagaguauccu

SEQ ID NO: 1761 - RNA, 25 nt, Artificial Sequence
  Description of Artificial Sequence: Synthetic oligonucleotide
uacccauuuccuuccuuccacuccc

SEQ ID NO: 1762 - RNA, 25 nt, Artificial Sequence
  Description of Artificial Sequence: Synthetic oligonucleotide
cuuugccagugccucucaccccaac

SEQ ID NO: 1763 - RNA, 25 nt, Artificial Sequence
  Description of Artificial Sequence: Synthetic oligonucleotide
cuaguagcuaaccaucacccccagg

SEQ ID NO: 1764 - RNA, 25 nt, Artificial Sequence
  Description of Artificial Sequence: Synthetic oligonucleotide
gacugaccucuuccuccucgcugcc

SEQ ID NO: 1765 - RNA, 25 nt, Artificial Sequence
  Description of Artificial Sequence: Synthetic oligonucleotide
cagaugauuguucaaagcacagaau

SEQ ID NO: 1766 - RNA, 25 nt, Artificial Sequence
  Description of Artificial Sequence: Synthetic oligonucleotide
uuugucagaaaccugcagggacucc

SEQ ID NO: 1767 - RNA, 25 nt, Artificial Sequence
  Description of Artificial Sequence: Synthetic oligonucleotide
caugcugccagccuucuccguaauu

SEQ ID NO: 1768 - RNA, 25 nt, Artificial Sequence
  Description of Artificial Sequence: Synthetic oligonucleotide
uagcauggccccaguccaugcuucu

SEQ ID NO: 1769 - RNA, 25 nt, Artificial Sequence
  Description of Artificial Sequence: Synthetic oligonucleotide
uagccuugguuccuucugccccucu

SEQ ID NO: 1770 - RNA, 25 nt, Artificial Sequence
  Description of Artificial Sequence: Synthetic oligonucleotide
uguuugaaauucuagagccagcugu

SEQ ID NO: 1771 - RNA, 25 nt, Artificial Sequence
  Description of Artificial Sequence: Synthetic oligonucleotide
ugggacaauuaucugugucaaaagc

SEQ ID NO: 1772 - RNA, 25 nt, Artificial Sequence
  Description of Artificial Sequence: Synthetic oligonucleotide
ccagaugugaaaacaucucaauaac

SEQ ID NO: 1773 - RNA, 25 nt, Artificial Sequence
  Description of Artificial Sequence: Synthetic oligonucleotide
caaacuggcugcuuuguucaaugcu

SEQ ID NO: 1774 - RNA, 25 nt, Artificial Sequence
  Description of Artificial Sequence: Synthetic oligonucleotide
uagaacaacgccugucacagaguag

SEQ ID NO: 1775 - RNA, 25 nt, Artificial Sequence
  Description of Artificial Sequence: Synthetic oligonucleotide
gaaacucaaaaauauuugcugagug

SEQ ID NO: 1776 - RNA, 25 nt, Artificial Sequence
  Description of Artificial Sequence: Synthetic oligonucleotide
gaaugaacaaaugaauaaaugcaua

SEQ ID NO: 1777 - RNA, 25 nt, Artificial Sequence
  Description of Artificial Sequence: Synthetic oligonucleotide
aauaaauaauuaaccaccaauccaa

SEQ ID NO: 1778 - RNA, 25 nt, Artificial Sequence
  Description of Artificial Sequence: Synthetic oligonucleotide
auuaaccaccaauccaacauccaga

SEQ ID NO: 1779 - RNA, 4624 nt, Homo sapiens
ggaggagguggaggaggagggcugcuugaggaaguauaagaaugaaguugugaagcugagauuccccuccauugggaccggagaaaccaggggagccccccgggcagccgcgcgccccuucccacggggcccuuuacugcgccgcgcgcccggcccccaccccucgcagcaccccgcgccccgcgcccucccagccggguccagccggagccauggggccggagccgcagugagcaccauggagcuggcggccuugugccgcugggggcuccuccucgcccucuugccccccggagccgcgagcacccaagugugcaccggcacagacaugaagcugcggcucccugccagucccgagacccaccuggacaugcuccgccaccucuaccagggcugccagguggugcagggaaaccuggaacucaccuaccugcccaccaaugccagccuguccuuccugcaggauauccaggaggugcagggcuacgugcucaucgcucacaaccaagugaggcaggucccacugcagaggcugcggauugugcgaggcacccagcucuuugaggacaacuaugcccuggccgugcuagacaauggagacccgcugaacaauaccaccccugucacaggggccuccccaggaggccugcgggagcugcagcuucgaagccucacagagaucuugaaaggaggggucuugauccagcggaacccccagcucugcuaccaggacacgauuuuguggaaggacaucuuccacaagaacaaccagcuggcucucacacugauagacaccaaccgcucucgggccugccaccccuguucuccgauguguaagggcucccgcugcuggggagagaguucugaggauugucagagccugacgcgcacugucugugccgguggcugugcccgcugcaaggggccacugcccacugacugcugccaugagcagugugcugccggcugcacgggccccaagcacucugacugccuggccugccuccacuucaaccacaguggcaucugugagcugcacugcccagcccuggucaccuacaacacagacacguuugaguccaugcccaaucccgagggccgguauacauucggcgccagcugugugacugccugucccuacaacuaccuuucuacggacgugggauccugcacccucgucugcccccugcacaaccaagaggugacagcagaggauggaacacagcggugugagaagugcagcaagcccugugcccgagugugcuauggucugggcauggagcacuugcgagaggugagggcaguuaccagugccaauauccaggaguuugcuggcugcaagaagaucuuugggagccuggcauuucugccggagagcuuugauggggacccagccuccaacacugccccgcuccagccagagcagcuccaaguguuugagacucuggaagagaucacagguuaccuauacaucucagcauggccggacagccugccugaccucagcgucuuccagaaccugcaaguaauccggggacgaauucugcacaauggcgccuacucgcugacccugcaagggcugggcaucagcuggcuggggcugcgcucacugagggaacugggcaguggacuggcccucauccaccauaacacccaccucugcuucgugcacacggugcccugggaccagcucuuucggaacccgcaccaagcucugcuccacacugccaaccggccagaggacgagugugugggcgagggccuggccugccaccagcugugcgcccgagggcacugcugggguccagggcccacccagugugucaacugcagccaguuccuucggggccaggagugcguggaggaaugccgaguacugcaggggcuccccagggaguaugugaaugccaggcacuguuugccgugccacccugagugucagccccagaauggcucagugaccuguuuuggaccggaggcugaccaguguguggccugugcccacuauaaggacccucccuucugcguggcccgcugccccagcggugugaaaccugaccucuccuacaugcccaucuggaaguuuccagaugaggagggcgcaugccagccuugccccaucaacugcacccacuccuguguggaccuggaugacaagggcugccccgccgagcagagagccagcccucugacguccaucaucucugcggugguuggcauucugcuggucguggucuuggggguggucuuugggauccucaucaagcgacggcagcagaagauccggaaguacacgaugcggagacugcugcaggaaacggagcugguggagccgcugacaccuagcggagcgaugcccaaccaggcgcagaugcggauccugaaagagacggagcugaggaaggugaaggugcuuggaucuggcgcuuuuggcacagucuacaagggcaucuggaucccugauggggagaaugugaaaauuccaguggccaucaaaguguugagggaaaacacaucccccaaagccaacaaagaaaucuuagacgaagcauacgugauggcuggugugggcuccccauaugucucccgccuucugggcaucugccugacauccacggugcagcuggugacacagcuuaugcccuauggcugccucuuagaccauguccgggaaaaccgcggacgccugggcucccaggaccugcugaacugguguaugcagauugccaaggggaugagcuaccuggaggaugugcggcucguacacagggacuuggccgcucggaacgugcuggucaagagucccaaccaugucaaaauuacagacuucgggcuggcucggcugcuggacauugacgagacagaguaccaugcagaugggggcaaggugcccaucaaguggauggcgcuggaguccauucuccgccggcgguucacccaccagagugauguguggaguuauggugugacugugugggagcugaugacuuuuggggccaaaccuuacgaugggaucccagcccgggagaucccugaccugcuggaaaagggggagcggcugccccagccccccaucugcaccauugaugucuacaugaucauggucaaauguuggaugauugacucugaaugucggccaagauuccgggaguuggugucugaauucucccgcauggccagggacccccagcgcuuuguggucauccagaaugaggacuugggcccagccagucccuuggacagcaccuucuaccgcucacugcuggaggacgaugacaugggggaccugguggaugcugaggaguaucugguaccccagcagggcuucuucuguccagacccugccccgggcgcugggggcaugguccaccacaggcaccgcagcucaucuaccaggaguggcgguggggaccugacacuagggcuggagcccucugaagaggaggcccccaggucuccacuggcacccuccgaaggggcuggcuccgauguauuugauggugaccugggaaugggggcagccaaggggcugcaaagccuccccacacaugaccccagcccucuacagcgguacagugaggaccccacaguaccccugcccucugagacugauggcuacguugccccccugaccugcagcccccagccugaauaugugaaccagccagauguucggccccagcccccuucgccccgagagggcccucugccugcugcccgaccugcuggugccacucuggaaaggcccaagacucucuccccagggaagaauggggucgucaaagacguuuuugccuuugggggugccguggagaaccccgaguacuugacaccccagggaggagcugccccucagccccacccuccuccugccuucagcccagccuucgacaaccucuauuacugggaccaggacccaccagagcggggggcuccacccagcaccuucaaagggacaccuacggcagagaacccagaguaccugggucuggacgugccagugugaaccagaaggccaaguccgcagaagcccugauguguccucagggagcagggaaggccugacuucugcuggcaucaagaggugggagggcccuccgaccacuuccaggggaaccugccaugccaggaaccuguccuaaggaaccuuccuuccugcuugaguucccagauggcuggaagggguccagccucguuggaagaggaacagcacuggggagucuuuguggauucugaggcccugcccaaugagacucuaggguccaguggaugccacagcccagcuuggcccuuuccuuccagauccuggguacugaaagccuuagggaagcuggccugagaggggaagcggcccuaagggagugucuaagaacaaaagcgacccauucagagacugucccugaaaccuaguacugccccccaugaggaaggaacagcaauggugucaguauccaggcuuuguacagagugcuuuucuguuuaguuuuuacuuuuuuuguuuuguuuuuuuaaagaugaaauaaagacccagggggagaauggguguuguauggggaggcaagugugggggguccuucuccacacccacuuuguccauuugcaaauauauuuuggaaaacagcua

SEQ ID NO: 1780 - RNA, 4816 nt, Homo sapiens
guucccggauuuuugugggcgccugccccgccccucgucccccugcuguguccauauaucgaggcgauaggguuaagggaaggcggacgccugauggguuaaugagcaaacugaaguguuuuccaugaucuuuuuugagucgcaauugaaguaccaccucccgagggugauugcuuccccaugcgggguagaaccuuugcuguccuguucaccacucuaccuccagcacagaauuuggcuuaugccuacucaaugugaagaugaugaggaugaaaaccuuugugaugauccacuuccacuuaaugaaugguggcaaagcaaagcuauauucaagaccacaugcaaagcuacucccugagcaaagagucacagauaaaacgggggcaccaguagaauggccaggacaaacgcagugcagcacagagacucagacccuggcagccaugccugcgcaggcagugaugagagugacauguacuguuguggacaugcacaaaagugagugugcaccggcacagacaugaagcugcggcucccugccagucccgagacccaccuggacaugcuccgccaccucuaccagggcugccagguggugcagggaaaccuggaacucaccuaccugcccaccaaugccagccuguccuuccugcaggauauccaggaggugcagggcuacgugcucaucgcucacaaccaagugaggcaggucccacugcagaggcugcggauugugcgaggcacccagcucuuugaggacaacuaugcccuggccgugcuagacaauggagacccgcugaacaauaccaccccugucacaggggccuccccaggaggccugcgggagcugcagcuucgaagccucacagagaucuugaaaggaggggucuugauccagcggaacccccagcucugcuaccaggacacgauuuuguggaaggacaucuuccacaagaacaaccagcuggcucucacacugauagacaccaaccgcucucgggccugccaccccuguucuccgauguguaagggcucccgcugcuggggagagaguucugaggauugucagagccugacgcgcacugucugugccgguggcugugcccgcugcaaggggccacugcccacugacugcugccaugagcagugugcugccggcugcacgggccccaagcacucugacugccuggccugccuccacuucaaccacaguggcaucugugagcugcacugcccagcccuggucaccuacaacacagacacguuugaguccaugcccaaucccgagggccgguauacauucggcgccagcugugugacugccugucccuacaacuaccuuucuacggacgugggauccugcacccucgucugcccccugcacaaccaagaggugacagcagaggauggaacacagcggugugagaagugcagcaagcccugugcccgagugugcuauggucugggcauggagcacuugcgagaggugagggcaguuaccagugccaauauccaggaguuugcuggcugcaagaagaucuuugggagccuggcauuucugccggagagcuuugauggggacccagccuccaacacugccccgcuccagccagagcagcuccaaguguuugagacucuggaagagaucacagguuaccuauacaucucagcauggccggacagccugccugaccucagcgucuuccagaaccugcaaguaauccggggacgaauucugcacaauggcgccuacucgcugacccugcaagggcugggcaucagcuggcuggggcugcgcucacugagggaacugggcaguggacuggcccucauccaccauaacacccaccucugcuucgugcacacggugcccugggaccagcucuuucggaacccgcaccaagcucugcuccacacugccaaccggccagaggacgagugugugggcgagggccuggccugccaccagcugugcgcccgagggcacugcugggguccagggcccacccagugugucaacugcagccaguuccuucggggccaggagugcguggaggaaugccgaguacugcaggggcuccccagggaguaugugaaugccaggcacuguuugccgugccacccugagugucagccccagaauggcucagugaccuguuuuggaccggaggcugaccaguguguggccugugcccacuauaaggacccucccuucugcguggcccgcugccccagcggugugaaaccugaccucuccuacaugcccaucuggaaguuuccagaugaggagggcgcaugccagccuugccccaucaacugcacccacuccuguguggaccuggaugacaagggcugccccgccgagcagagagccagcccucugacguccaucaucucugcggugguuggcauucugcuggucguggucuuggggguggucuuugggauccucaucaagcgacggcagcagaagauccggaaguacacgaugcggagacugcugcaggaaacggagcugguggagccgcugacaccuagcggagcgaugcccaaccaggcgcagaugcggauccugaaagagacggagcugaggaaggugaaggugcuuggaucuggcgcuuuuggcacagucuacaagggcaucuggaucccugauggggagaaugugaaaauuccaguggccaucaaaguguugagggaaaacacaucccccaaagccaacaaagaaaucuuagacgaagcauacgugauggcuggugugggcuccccauaugucucccgccuucugggcaucugccugacauccacggugcagcuggugacacagcuuaugcccuauggcugccucuuagaccauguccgggaaaaccgcggacgccugggcucccaggaccugcugaacugguguaugcagauugccaaggggaugagcuaccuggaggaugugcggcucguacacagggacuuggccgcucggaacgugcuggucaagagucccaaccaugucaaaauuacagacuucgggcuggcucggcugcuggacauugacgagacagaguaccaugcagaugggggcaaggugcccaucaaguggauggcgcuggaguccauucuccgccggcgguucacccaccagagugauguguggaguuauggugugacugugugggagcugaugacuuuuggggccaaaccuuacgaugggaucccagcccgggagaucccugaccugcuggaaaagggggagcggcugccccagccccccaucugcaccauugaugucuacaugaucauggucaaauguuggaugauugacucugaaugucggccaagauuccgggaguuggugucugaauucucccgcauggccagggacccccagcgcuuuguggucauccagaaugaggacuugggcccagccagucccuuggacagcaccuucuaccgcucacugcuggaggacgaugacaugggggaccugguggaugcugaggaguaucugguaccccagcagggcuucuucuguccagacccugccccgggcgcugggggcaugguccaccacaggcaccgcagcucaucuaccaggaguggcgguggggaccugacacuagggcuggagcccucugaagaggaggcccccaggucuccacuggcacccuccgaaggggcuggcuccgauguauuugauggugaccugggaaugggggcagccaaggggcugcaaagccuccccacacaugaccccagcccucuacagcgguacagugaggaccccacaguaccccugcccucugagacugauggcuacguugccccccugaccugcagcccccagccugaauaugugaaccagccagauguucggccccagcccccuucgccccgagagggcccucugccugcugcccgaccugcuggugccacucuggaaaggcccaagacucucuccccagggaagaauggggucgucaaagacguuuuugccuuugggggugccguggagaaccccgaguacuugacaccccagggaggagcugccccucagccccacccuccuccugccuucagcccagccuucgacaaccucuauuacugggaccaggacccaccagagcggggggcuccacccagcaccuucaaagggacaccuacggcagagaacccagaguaccugggucuggacgugccagugugaaccagaaggccaaguccgcagaagcccugauguguccucagggagcagggaaggccugacuucugcuggcaucaagaggugggagggcccuccgaccacuuccaggggaaccugccaugccaggaaccuguccuaaggaaccuuccuuccugcuugaguucccagauggcuggaagggguccagccucguuggaagaggaacagcacuggggagucuuuguggauucugaggcccugcccaaugagacucuaggguccaguggaugccacagcccagcuuggcccuuuccuuccagauccuggguacugaaagccuuagggaagcuggccugagaggggaagcggcccuaagggagugucuaagaacaaaagcgacccauucagagacugucccugaaaccuaguacugccccccaugaggaaggaacagcaauggugucaguauccaggcuuuguacagagugcuuuucuguuuaguuuuuacuuuuuuuguuuuguuuuuuuaaagaugaaauaaagacccagggggagaauggguguuguauggggaggcaagugugggggguccuucuccacacccacuuuguccauuugcaaauauauuuuggaaaacagcua

SEQ ID NO: 1781 - RNA, 19 nt, Artificial Sequence
  Description of Artificial Sequence: Synthetic oligonucleotide
guucccggauuuuuguggg

SEQ ID NO: 1782 - RNA, 19 nt, Artificial Sequence
  Description of Artificial Sequence: Synthetic oligonucleotide
gcgccugccccgccccucg

SEQ ID NO: 1783 - RNA, 19 nt, Artificial Sequence
  Description of Artificial Sequence: Synthetic oligonucleotide
gucccccugcuguguccau

SEQ ID NO: 1784 - RNA, 19 nt, Artificial Sequence
  Description of Artificial Sequence: Synthetic oligonucleotide
uauaucgaggcgauagggu

SEQ ID NO: 1785 - RNA, 19 nt, Artificial Sequence
  Description of Artificial Sequence: Synthetic oligonucleotide
uuaagggaaggcggacgcc

SEQ ID NO: 1786 - RNA, 19 nt, Artificial Sequence
  Description of Artificial Sequence: Synthetic oligonucleotide
cugauggguuaaugagcaa

SEQ ID NO: 1787 - RNA, 19 nt, Artificial Sequence
  Description of Artificial Sequence: Synthetic oligonucleotide
aacugaaguguuuuccaug

SEQ ID NO: 1788 - RNA, 19 nt, Artificial Sequence
  Description of Artificial Sequence: Synthetic oligonucleotide
gaucuuuuuugagucgcaa

SEQ ID NO: 1789 - RNA, 19 nt, Artificial Sequence
  Description of Artificial Sequence: Synthetic oligonucleotide
auugaaguaccaccucccg

SEQ ID NO: 1790 - RNA, 19 nt, Artificial Sequence
  Description of Artificial Sequence: Synthetic oligonucleotide
gagggugauugcuucccca

SEQ ID NO: 1791 - RNA, 19 nt, Artificial Sequence
  Description of Artificial Sequence: Synthetic oligonucleotide
augcgggguagaaccuuug

SEQ ID NO: 1792 - RNA, 19 nt, Artificial Sequence
  Description of Artificial Sequence: Synthetic oligonucleotide
gcuguccuguucaccacuc

SEQ ID NO: 1793 - RNA, 19 nt, Artificial Sequence
  Description of Artificial Sequence: Synthetic oligonucleotide
cuaccuccagcacagaauu

SEQ ID NO: 1794 - RNA, 19 nt, Artificial Sequence
  Description of Artificial Sequence: Synthetic oligonucleotide
uuggcuuaugccuacucaa

SEQ ID NO: 1795 - RNA, 19 nt, Artificial Sequence
  Description of Artificial Sequence: Synthetic oligonucleotide
augugaagaugaugaggau

SEQ ID NO: 1796 - RNA, 19 nt, Artificial Sequence
  Description of Artificial Sequence: Synthetic oligonucleotide
ugaaaaccuuugugaugau

SEQ ID NO: 1797 - RNA, 19 nt, Artificial Sequence
  Description of Artificial Sequence: Synthetic oligonucleotide
uccacuuccacuuaaugaa

SEQ ID NO: 1798 - RNA, 19 nt, Artificial Sequence
  Description of Artificial Sequence: Synthetic oligonucleotide
augguggcaaagcaaagcu

SEQ ID NO: 1799 - RNA, 19 nt, Artificial Sequence
  Description of Artificial Sequence: Synthetic oligonucleotide
uauauucaagaccacaugc

SEQ ID NO: 1800 - RNA, 19 nt, Artificial Sequence
  Description of Artificial Sequence: Synthetic oligonucleotide
caaagcuacucccugagca

SEQ ID NO: 1801 - RNA, 19 nt, Artificial Sequence
  Description of Artificial Sequence: Synthetic oligonucleotide
aaagagucacagauaaaac

SEQ ID NO: 1802 - RNA, 19 nt, Artificial Sequence
  Description of Artificial Sequence: Synthetic oligonucleotide
cgggggcaccaguagaaug

SEQ ID NO: 1803 - RNA, 19 nt, Artificial Sequence
  Description of Artificial Sequence: Synthetic oligonucleotide
ggccaggacaaacgcagug

SEQ ID NO: 1804 - RNA, 19 nt, Artificial Sequence
  Description of Artificial Sequence: Synthetic oligonucleotide
gcagcacagagacucagac

SEQ ID NO: 1805 - RNA, 19 nt, Artificial Sequence
  Description of Artificial Sequence: Synthetic oligonucleotide
cccuggcagccaugccugc

SEQ ID NO: 1806 - RNA, 19 nt, Artificial Sequence
  Description of Artificial Sequence: Synthetic oligonucleotide
cgcaggcagugaugagagu

SEQ ID NO: 1807 - RNA, 19 nt, Artificial Sequence
  Description of Artificial Sequence: Synthetic oligonucleotide
ugacauguacuguugugga

SEQ ID NO: 1808 - RNA, 19 nt, Artificial Sequence
  Description of Artificial Sequence: Synthetic oligonucleotide
acaugcacaaaagugagug

SEQ ID NO: 1809 - RNA, 19 nt, Artificial Sequence
  Description of Artificial Sequence: Synthetic oligonucleotide
gugcaccggcacagacaug

SEQ ID NO: 1810 - RNA, 19 nt, Artificial Sequence
  Description of Artificial Sequence: Synthetic oligonucleotide
gaagcugcggcucccugcc

SEQ ID NO: 1811 - RNA, 19 nt, Artificial Sequence
  Description of Artificial Sequence: Synthetic oligonucleotide
cagucccgagacccaccug

SEQ ID NO: 1812 - RNA, 19 nt, Artificial Sequence
  Description of Artificial Sequence: Synthetic oligonucleotide
ggacaugcuccgccaccuc

SEQ ID NO: 1813 - RNA, 19 nt, Artificial Sequence
  Description of Artificial Sequence: Synthetic oligonucleotide
cuaccagggcugccaggug

SEQ ID NO: 1814 - RNA, 19 nt, Artificial Sequence
  Description of Artificial Sequence: Synthetic oligonucleotide
ggugcagggaaaccuggaa

SEQ ID NO: 1815 - RNA, 19 nt, Artificial Sequence
  Description of Artificial Sequence: Synthetic oligonucleotide
acucaccuaccugcccacc

SEQ ID NO: 1816 - RNA, 19 nt, Artificial Sequence
  Description of Artificial Sequence: Synthetic oligonucleotide
caaugccagccuguccuuc

SEQ ID NO: 1817 - RNA, 19 nt, Artificial Sequence
  Description of Artificial Sequence: Synthetic oligonucleotide
ccugcaggauauccaggag

SEQ ID NO: 1818 - RNA, 19 nt, Artificial Sequence
  Description of Artificial Sequence: Synthetic oligonucleotide
ggugcagggcuacgugcuc

SEQ ID NO: 1819 - RNA, 19 nt, Artificial Sequence
  Description of Artificial Sequence: Synthetic oligonucleotide
caucgcucacaaccaagug

SEQ ID NO: 1820 - RNA, 19 nt, Artificial Sequence
  Description of Artificial Sequence: Synthetic oligonucleotide
gaggcaggucccacugcag

SEQ ID NO: 1821 - RNA, 19 nt, Artificial Sequence
  Description of Artificial Sequence: Synthetic oligonucleotide
gaggcugcggauugugcga

SEQ ID NO: 1822 - RNA, 19 nt, Artificial Sequence
  Description of Artificial Sequence: Synthetic oligonucleotide
aggcacccagcucuuugag

SEQ ID NO: 1823 - RNA, 19 nt, Artificial Sequence
  Description of Artificial Sequence: Synthetic oligonucleotide
ggacaacuaugcccuggcc

SEQ ID NO: 1824 - RNA, 19 nt, Artificial Sequence
  Description of Artificial Sequence: Synthetic oligonucleotide
cgugcuagacaauggagac

SEQ ID NO: 1825 - RNA, 19 nt, Artificial Sequence
  Description of Artificial Sequence: Synthetic oligonucleotide
cccgcugaacaauaccacc

SEQ ID NO: 1826 - RNA, 19 nt, Artificial Sequence
  Description of Artificial Sequence: Synthetic oligonucleotide
cccugucacaggggccucc

SEQ ID NO: 1827 - RNA, 19 nt, Artificial Sequence
  Description of Artificial Sequence: Synthetic oligonucleotide
cccaggaggccugcgggag

SEQ ID NO: 1828 - RNA, 19 nt, Artificial Sequence
  Description of Artificial Sequence: Synthetic oligonucleotide
gcugcagcuucgaagccuc

SEQ ID NO: 1829 - RNA, 19 nt, Artificial Sequence
  Description of Artificial Sequence: Synthetic oligonucleotide
cacagagaucuugaaagga

SEQ ID NO: 1830 - RNA, 19 nt, Artificial Sequence
  Description of Artificial Sequence: Synthetic oligonucleotide
aggggucuugauccagcgg

SEQ ID NO: 1831 - RNA, 19 nt, Artificial Sequence
  Description of Artificial Sequence: Synthetic oligonucleotide
gaacccccagcucugcuac

SEQ ID NO: 1832 - RNA, 19 nt, Artificial Sequence
  Description of Artificial Sequence: Synthetic oligonucleotide
ccaggacacgauuuugugg

SEQ ID NO: 1833 - RNA, 19 nt, Artificial Sequence
  Description of Artificial Sequence: Synthetic oligonucleotide
gaaggacaucuuccacaag

SEQ ID NO: 1834 - RNA, 19 nt, Artificial Sequence
  Description of Artificial Sequence: Synthetic oligonucleotide
gaacaaccagcuggcucuc

SEQ ID NO: 1835 - RNA, 19 nt, Artificial Sequence
  Description of Artificial Sequence: Synthetic oligonucleotide
cacacugauagacaccaac

SEQ ID NO: 1836 - RNA, 19 nt, Artificial Sequence
  Description of Artificial Sequence: Synthetic oligonucleotide
ccgcucucgggccugccac

SEQ ID NO: 1837 - RNA, 19 nt, Artificial Sequence
  Description of Artificial Sequence: Synthetic oligonucleotide
ccccuguucuccgaugugu

SEQ ID NO: 1838 - RNA, 19 nt, Artificial Sequence
  Description of Artificial Sequence: Synthetic oligonucleotide
uaagggcucccgcugcugg

SEQ ID NO: 1839 - RNA, 19 nt, Artificial Sequence
  Description of Artificial Sequence: Synthetic oligonucleotide
gggagagaguucugaggau

SEQ ID NO: 1840 - RNA, 19 nt, Artificial Sequence
  Description of Artificial Sequence: Synthetic oligonucleotide
uugucagagccugacgcgc

SEQ ID NO: 1841 - RNA, 19 nt, Artificial Sequence
  Description of Artificial Sequence: Synthetic oligonucleotide
cacugucugugccgguggc

SEQ ID NO: 1842 - RNA, 19 nt, Artificial Sequence
  Description of Artificial Sequence: Synthetic oligonucleotide
cugugcccgcugcaagggg

SEQ ID NO: 1843 - RNA, 19 nt, Artificial Sequence
  Description of Artificial Sequence: Synthetic oligonucleotide
gccacugcccacugacugc

SEQ ID NO: 1844 - RNA, 19 nt, Artificial Sequence
  Description of Artificial Sequence: Synthetic oligonucleotide
cugccaugagcagugugcu

SEQ ID NO: 1845 - RNA, 19 nt, Artificial Sequence
  Description of Artificial Sequence: Synthetic oligonucleotide
ugccggcugcacgggcccc

SEQ ID NO: 1846 - RNA, 19 nt, Artificial Sequence
  Description of Artificial Sequence: Synthetic oligonucleotide
caagcacucugacugccug

SEQ ID NO: 1847 - RNA, 19 nt, Artificial Sequence
  Description of Artificial Sequence: Synthetic oligonucleotide
ggccugccuccacuucaac

SEQ ID NO: 1848 - RNA, 19 nt, Artificial Sequence
  Description of Artificial Sequence: Synthetic oligonucleotide
ccacaguggcaucugugag

SEQ ID NO: 1849 - RNA, 19 nt, Artificial Sequence
  Description of Artificial Sequence: Synthetic oligonucleotide
gcugcacugcccagcccug

SEQ ID NO: 1850 - RNA, 19 nt, Artificial Sequence
  Description of Artificial Sequence: Synthetic oligonucleotide
ggucaccuacaacacagac

SEQ ID NO: 1851 - RNA, 19 nt, Artificial Sequence
  Description of Artificial Sequence: Synthetic oligonucleotide
cacguuugaguccaugccc

SEQ ID NO: 1852 - RNA, 19 nt, Artificial Sequence
  Description of Artificial Sequence: Synthetic oligonucleotide
caaucccgagggccgguau

SEQ ID NO: 1853 - RNA, 19 nt, Artificial Sequence
  Description of Artificial Sequence: Synthetic oligonucleotide
uacauucggcgccagcugu

SEQ ID NO: 1854 - RNA, 19 nt, Artificial Sequence
  Description of Artificial Sequence: Synthetic oligonucleotide
ugugacugccugucccuac

SEQ ID NO: 1855 - RNA, 19 nt, Artificial Sequence
  Description of Artificial Sequence: Synthetic oligonucleotide
caacuaccuuucuacggac

SEQ ID NO: 1856 - RNA, 19 nt, Artificial Sequence
  Description of Artificial Sequence: Synthetic oligonucleotide
cgugggauccugcacccuc

SEQ ID NO: 1857 - RNA, 19 nt, Artificial Sequence
  Description of Artificial Sequence: Synthetic oligonucleotide
cgucugcccccugcacaac

SEQ ID NO: 1858 - RNA, 19 nt, Artificial Sequence
  Description of Artificial Sequence: Synthetic oligonucleotide
ccaagaggugacagcagag

SEQ ID NO: 1859 - RNA, 19 nt, Artificial Sequence
  Description of Artificial Sequence: Synthetic oligonucleotide
ggauggaacacagcggugu

SEQ ID NO: 1860 - RNA, 19 nt, Artificial Sequence
  Description of Artificial Sequence: Synthetic oligonucleotide
ugagaagugcagcaagccc

SEQ ID NO: 1861 - RNA, 19 nt, Artificial Sequence
  Description of Artificial Sequence: Synthetic oligonucleotide
cugugcccgagugugcuau

SEQ ID NO: 1862 - RNA, 19 nt, Artificial Sequence
  Description of Artificial Sequence: Synthetic oligonucleotide
uggucugggcauggagcac

SEQ ID NO: 1863 - RNA, 19 nt, Artificial Sequence
  Description of Artificial Sequence: Synthetic oligonucleotide
cuugcgagaggugagggca

SEQ ID NO: 1864 - RNA, 19 nt, Artificial Sequence
  Description of Artificial Sequence: Synthetic oligonucleotide
aguuaccagugccaauauc

SEQ ID NO: 1865 - RNA, 19 nt, Artificial Sequence
  Description of Artificial Sequence: Synthetic oligonucleotide
ccaggaguuugcuggcugc

SEQ ID NO: 1866 - RNA, 19 nt, Artificial Sequence
  Description of Artificial Sequence: Synthetic oligonucleotide
caagaagaucuuugggagc

SEQ ID NO: 1867 - RNA, 19 nt, Artificial Sequence
  Description of Artificial Sequence: Synthetic oligonucleotide
ccuggcauuucugccggag

SEQ ID NO: 1868 - RNA, 19 nt, Artificial Sequence
  Description of Artificial Sequence: Synthetic oligonucleotide
gagcuuugauggggaccca

SEQ ID NO: 1869 - RNA, 19 nt, Artificial Sequence
  Description of Artificial Sequence: Synthetic oligonucleotide
agccuccaacacugccccg

SEQ ID NO: 1870 - RNA, 19 nt, Artificial Sequence
  Description of Artificial Sequence: Synthetic oligonucleotide
gcuccagccagagcagcuc

SEQ ID NO: 1871 - RNA, 19 nt, Artificial Sequence
  Description of Artificial Sequence: Synthetic oligonucleotide
ccaaguguuugagacucug

SEQ ID NO: 1872 - RNA, 19 nt, Artificial Sequence
  Description of Artificial Sequence: Synthetic oligonucleotide
ggaagagaucacagguuac

SEQ ID NO: 1873 - RNA, 19 nt, Artificial Sequence
  Description of Artificial Sequence: Synthetic oligonucleotide
ccuauacaucucagcaugg

SEQ ID NO: 1874 - RNA, 19 nt, Artificial Sequence
  Description of Artificial Sequence: Synthetic oligonucleotide
gccggacagccugccugac

SEQ ID NO: 1875 - RNA, 19 nt, Artificial Sequence
  Description of Artificial Sequence: Synthetic oligonucleotide
ccucagcgucuuccagaac

SEQ ID NO: 1876 - RNA, 19 nt, Artificial Sequence
  Description of Artificial Sequence: Synthetic oligonucleotide
ccugcaaguaauccgggga

SEQ ID NO: 1877 - RNA, 19 nt, Artificial Sequence
  Description of Artificial Sequence: Synthetic oligonucleotide
acgaauucugcacaauggc

SEQ ID NO: 1878 - RNA, 19 nt, Artificial Sequence
  Description of Artificial Sequence: Synthetic oligonucleotide
cgccuacucgcugacccug

SEQ ID NO: 1879 - RNA, 19 nt, Artificial Sequence
  Description of Artificial Sequence: Synthetic oligonucleotide
gcaagggcugggcaucagc

SEQ ID NO: 1880 - RNA, 19 nt, Artificial Sequence
  Description of Artificial Sequence: Synthetic oligonucleotide
cuggcuggggcugcgcuca

SEQ ID NO: 1881 - RNA, 19 nt, Artificial Sequence
  Description of Artificial Sequence: Synthetic oligonucleotide
acugagggaacugggcagu

SEQ ID NO: 1882 - RNA, 19 nt, Artificial Sequence
  Description of Artificial Sequence: Synthetic oligonucleotide
uggacuggcccucauccac

SEQ ID NO: 1883 - RNA, 19 nt, Artificial Sequence
  Description of Artificial Sequence: Synthetic oligonucleotide
ccauaacacccaccucugc

SEQ ID NO: 1884 - RNA, 19 nt, Artificial Sequence
  Description of Artificial Sequence: Synthetic oligonucleotide
cuucgugcacacggugccc

SEQ ID NO: 1885 - RNA, 19 nt, Artificial Sequence
  Description of Artificial Sequence: Synthetic oligonucleotide
cugggaccagcucuuucgg

SEQ ID NO: 1886 - RNA, 19 nt, Artificial Sequence
  Description of Artificial Sequence: Synthetic oligonucleotide
gaacccgcaccaagcucug

SEQ ID NO: 1887 - RNA, 19 nt, Artificial Sequence
  Description of Artificial Sequence: Synthetic oligonucleotide
gcuccacacugccaaccgg

SEQ ID NO: 1888 - RNA, 19 nt, Artificial Sequence
  Description of Artificial Sequence: Synthetic oligonucleotide
gccagaggacgagugugug

SEQ ID NO: 1889 - RNA, 19 nt, Artificial Sequence
  Description of Artificial Sequence: Synthetic oligonucleotide
gggcgagggccuggccugc

SEQ ID NO: 1890 - RNA, 19 nt, Artificial Sequence
  Description of Artificial Sequence: Synthetic oligonucleotide
ccaccagcugugcgcccga

SEQ ID NO: 1891 - RNA, 19 nt, Artificial Sequence
  Description of Artificial Sequence: Synthetic oligonucleotide
agggcacugcuggggucca

SEQ ID NO: 1892 - RNA, 19 nt, Artificial Sequence
  Description of Artificial Sequence: Synthetic oligonucleotide
agggcccacccaguguguc

SEQ ID NO: 1893 - RNA, 19 nt, Artificial Sequence
  Description of Artificial Sequence: Synthetic oligonucleotide
caacugcagccaguuccuu

SEQ ID NO: 1894 - RNA, 19 nt, Artificial Sequence
  Description of Artificial Sequence: Synthetic oligonucleotide
ucggggccaggagugcgug

SEQ ID NO: 1895 - RNA, 19 nt, Artificial Sequence
  Description of Artificial Sequence: Synthetic oligonucleotide
ggaggaaugccgaguacug

SEQ ID NO: 1896 - RNA, 19 nt, Artificial Sequence
  Description of Artificial Sequence: Synthetic oligonucleotide
gcaggggcuccccagggag

SEQ ID NO: 1897 - RNA, 19 nt, Artificial Sequence
  Description of Artificial Sequence: Synthetic oligonucleotide
guaugugaaugccaggcac

SEQ ID NO: 1898 - RNA, 19 nt, Artificial Sequence
  Description of Artificial Sequence: Synthetic oligonucleotide
cuguuugccgugccacccu

SEQ ID NO: 1899 - RNA, 19 nt, Artificial Sequence
  Description of Artificial Sequence: Synthetic oligonucleotide
ugagugucagccccagaau

SEQ ID NO: 1900 - RNA, 19 nt, Artificial Sequence
  Description of Artificial Sequence: Synthetic oligonucleotide
uggcucagugaccuguuuu

SEQ ID NO: 1901 - RNA, 19 nt, Artificial Sequence
  Description of Artificial Sequence: Synthetic oligonucleotide
uggaccggaggcugaccag

SEQ ID NO: 1902 - RNA, 19 nt, Artificial Sequence
  Description of Artificial Sequence: Synthetic oligonucleotide
guguguggccugugcccac

SEQ ID NO: 1903 - RNA, 19 nt, Artificial Sequence
  Description of Artificial Sequence: Synthetic oligonucleotide
cuauaaggacccucccuuc

SEQ ID NO: 1904 - RNA, 19 nt, Artificial Sequence
  Description of Artificial Sequence: Synthetic oligonucleotide
cugcguggcccgcugcccc

SEQ ID NO: 1905 - RNA, 19 nt, Artificial Sequence
  Description of Artificial Sequence: Synthetic oligonucleotide
cagcggugugaaaccugac

SEQ ID NO: 1906 - RNA, 19 nt, Artificial Sequence
  Description of Artificial Sequence: Synthetic oligonucleotide
ccucuccuacaugcccauc

SEQ ID NO: 1907 - RNA, 19 nt, Artificial Sequence
  Description of Artificial Sequence: Synthetic oligonucleotide
cuggaaguuuccagaugag

SEQ ID NO: 1908 - RNA, 19 nt, Artificial Sequence
  Description of Artificial Sequence: Synthetic oligonucleotide
ggagggcgcaugccagccu

SEQ ID NO: 1909 - RNA, 19 nt, Artificial Sequence
  Description of Artificial Sequence: Synthetic oligonucleotide
uugccccaucaacugcacc

SEQ ID NO: 1910 - RNA, 19 nt, Artificial Sequence
  Description of Artificial Sequence: Synthetic oligonucleotide
ccacuccuguguggaccug

SEQ ID NO: 1911 - RNA, 19 nt, Artificial Sequence
  Description of Artificial Sequence: Synthetic oligonucleotide
ggaugacaagggcugcccc

SEQ ID NO: 1912 - RNA, 19 nt, Artificial Sequence
  Description of Artificial Sequence: Synthetic oligonucleotide
cgccgagcagagagccagc

SEQ ID NO: 1913 - RNA, 19 nt, Artificial Sequence
  Description of Artificial Sequence: Synthetic oligonucleotide
cccucugacguccaucauc

SEQ ID NO: 1914 - RNA, 19 nt, Artificial Sequence
  Description of Artificial Sequence: Synthetic oligonucleotide
cucugcggugguuggcauu

SEQ ID NO: 1915 - RNA, 19 nt, Artificial Sequence
  Description of Artificial Sequence: Synthetic oligonucleotide
ucugcuggucguggucuug

SEQ ID NO: 1916 - RNA, 19 nt, Artificial Sequence
  Description of Artificial Sequence: Synthetic oligonucleotide
ggggguggucuuugggauc

SEQ ID NO: 1917 - RNA, 19 nt, Artificial Sequence
  Description of Artificial Sequence: Synthetic oligonucleotide
ccucaucaagcgacggcag

SEQ ID NO: 1918 - RNA, 19 nt, Artificial Sequence
  Description of Artificial Sequence: Synthetic oligonucleotide
gcagaagauccggaaguac

SEQ ID NO: 1919 - RNA, 19 nt, Artificial Sequence
  Description of Artificial Sequence: Synthetic oligonucleotide
cacgaugcggagacugcug

SEQ ID NO: 1920 - RNA, 19 nt, Artificial Sequence
  Description of Artificial Sequence: Synthetic oligonucleotide
gcaggaaacggagcuggug

SEQ ID NO: 1921 - RNA, 19 nt, Artificial Sequence
  Description of Artificial Sequence: Synthetic oligonucleotide
ggagccgcugacaccuagc

SEQ ID NO: 1922 - RNA, 19 nt, Artificial Sequence
  Description of Artificial Sequence: Synthetic oligonucleotide
cggagcgaugcccaaccag

SEQ ID NO: 1923 - RNA, 19 nt, Artificial Sequence
  Description of Artificial Sequence: Synthetic oligonucleotide
ggcgcagaugcggauccug

SEQ ID NO: 1924 - RNA, 19 nt, Artificial Sequence
  Description of Artificial Sequence: Synthetic oligonucleotide
gaaagagacggagcugagg

SEQ ID NO: 1925 - RNA, 19 nt, Artificial Sequence
  Description of Artificial Sequence: Synthetic oligonucleotide
gaaggugaaggugcuugga

SEQ ID NO: 1926 - RNA, 19 nt, Artificial Sequence
  Description of Artificial Sequence: Synthetic oligonucleotide
aucuggcgcuuuuggcaca

SEQ ID NO: 1927 - RNA, 19 nt, Artificial Sequence
  Description of Artificial Sequence: Synthetic oligonucleotide
agucuacaagggcaucugg

SEQ ID NO: 1928 - RNA, 19 nt, Artificial Sequence
  Description of Artificial Sequence: Synthetic oligonucleotide
gaucccugauggggagaau

SEQ ID NO: 1929 - RNA, 19 nt, Artificial Sequence
  Description of Artificial Sequence: Synthetic oligonucleotide
ugugaaaauuccaguggcc

SEQ ID NO: 1930 - RNA, 19 nt, Artificial Sequence
  Description of Artificial Sequence: Synthetic oligonucleotide
caucaaaguguugagggaa

SEQ ID NO: 1931 - RNA, 19 nt, Artificial Sequence
  Description of Artificial Sequence: Synthetic oligonucleotide
aaacacaucccccaaagcc

SEQ ID NO: 1932 - RNA, 19 nt, Artificial Sequence
  Description of Artificial Sequence: Synthetic oligonucleotide
caacaaagaaaucuuagac

SEQ ID NO: 1933 - RNA, 19 nt, Artificial Sequence
  Description of Artificial Sequence: Synthetic oligonucleotide
cgaagcauacgugauggcu

SEQ ID NO: 1934 - RNA, 19 nt, Artificial Sequence
  Description of Artificial Sequence: Synthetic oligonucleotide
uggugugggcuccccauau

SEQ ID NO: 1935 - RNA, 19 nt, Artificial Sequence
  Description of Artificial Sequence: Synthetic oligonucleotide
ugucucccgccuucugggc

SEQ ID NO: 1936 - RNA, 19 nt, Artificial Sequence
  Description of Artificial Sequence: Synthetic oligonucleotide
caucugccugacauccacg

SEQ ID NO: 1937 - RNA, 19 nt, Artificial Sequence
  Description of Artificial Sequence: Synthetic oligonucleotide
ggugcagcuggugacacag

SEQ ID NO: 1938 - RNA, 19 nt, Artificial Sequence
  Description of Artificial Sequence: Synthetic oligonucleotide
gcuuaugcccuauggcugc

SEQ ID NO: 1939 - RNA, 19 nt, Artificial Sequence
  Description of Artificial Sequence: Synthetic oligonucleotide
ccucuuagaccauguccgg

SEQ ID NO: 1940 - RNA, 19 nt, Artificial Sequence
  Description of Artificial Sequence: Synthetic oligonucleotide
ggaaaaccgcggacgccug

SEQ ID NO: 1941 - RNA, 19 nt, Artificial Sequence
  Description of Artificial Sequence: Synthetic oligonucleotide
gggcucccaggaccugcug

SEQ ID NO: 1942 - RNA, 19 nt, Artificial Sequence
  Description of Artificial Sequence: Synthetic oligonucleotide
gaacugguguaugcagauu

SEQ ID NO: 1943 - RNA, 19 nt, Artificial Sequence
  Description of Artificial Sequence: Synthetic oligonucleotide
ugccaaggggaugagcuac

SEQ ID NO: 1944 - RNA, 19 nt, Artificial Sequence
  Description of Artificial Sequence: Synthetic oligonucleotide
ccuggaggaugugcggcuc

SEQ ID NO: 1945 - RNA, 19 nt, Artificial Sequence
  Description of Artificial Sequence: Synthetic oligonucleotide
cguacacagggacuuggcc

SEQ ID NO: 1946 - RNA, 19 nt, Artificial Sequence
  Description of Artificial Sequence: Synthetic oligonucleotide
cgcucggaacgugcugguc

SEQ ID NO: 1947 - RNA, 19 nt, Artificial Sequence
  Description of Artificial Sequence: Synthetic oligonucleotide
caagagucccaaccauguc

SEQ ID NO: 1948 - RNA, 19 nt, Artificial Sequence
  Description of Artificial Sequence: Synthetic oligonucleotide
caaaauuacagacuucggg

SEQ ID NO: 1949 - RNA, 19 nt, Artificial Sequence
  Description of Artificial Sequence: Synthetic oligonucleotide
gcuggcucggcugcuggac

SEQ ID NO: 1950 - RNA, 19 nt, Artificial Sequence
  Description of Artificial Sequence: Synthetic oligonucleotide
cauugacgagacagaguac

SEQ ID NO: 1951 - RNA, 19 nt, Artificial Sequence
  Description of Artificial Sequence: Synthetic oligonucleotide
ccaugcagaugggggcaag

SEQ ID NO: 1952 - RNA, 19 nt, Artificial Sequence
  Description of Artificial Sequence: Synthetic oligonucleotide
ggugcccaucaaguggaug

SEQ ID NO: 1953 - RNA, 19 nt, Artificial Sequence
  Description of Artificial Sequence: Synthetic oligonucleotide
ggcgcuggaguccauucuc

SEQ ID NO: 1954 - RNA, 19 nt, Artificial Sequence
  Description of Artificial Sequence: Synthetic oligonucleotide
ccgccggcgguucacccac

SEQ ID NO: 1955 - RNA, 19 nt, Artificial Sequence
  Description of Artificial Sequence: Synthetic oligonucleotide
ccagagugauguguggagu

SEQ ID NO: 1956 - RNA, 19 nt, Artificial Sequence
  Description of Artificial Sequence: Synthetic oligonucleotide
uuauggugugacugugugg

SEQ ID NO: 1957 - RNA, 19 nt, Artificial Sequence
  Description of Artificial Sequence: Synthetic oligonucleotide
ggagcugaugacuuuuggg

SEQ ID NO: 1958 - RNA, 19 nt, Artificial Sequence
  Description of Artificial Sequence: Synthetic oligonucleotide
ggccaaaccuuacgauggg

SEQ ID NO: 1959 - RNA, 19 nt, Artificial Sequence
  Description of Artificial Sequence: Synthetic oligonucleotide
gaucccagcccgggagauc

SEQ ID NO: 1960 - RNA, 19 nt, Artificial Sequence
  Description of Artificial Sequence: Synthetic oligonucleotide
cccugaccugcuggaaaag

SEQ ID NO: 1961 - RNA, 19 nt, Artificial Sequence
  Description of Artificial Sequence: Synthetic oligonucleotide
gggggagcggcugccccag

SEQ ID NO: 1962 - RNA, 19 nt, Artificial Sequence
  Description of Artificial Sequence: Synthetic oligonucleotide
gccccccaucugcaccauu

SEQ ID NO: 1963 - RNA, 19 nt, Artificial Sequence
  Description of Artificial Sequence: Synthetic oligonucleotide
ugaugucuacaugaucaug

SEQ ID NO: 1964 - RNA, 19 nt, Artificial Sequence
  Description of Artificial Sequence: Synthetic oligonucleotide
ggucaaauguuggaugauu

SEQ ID NO: 1965 - RNA, 19 nt, Artificial Sequence
  Description of Artificial Sequence: Synthetic oligonucleotide
ugacucugaaugucggcca

SEQ ID NO: 1966 - RNA, 19 nt, Artificial Sequence
  Description of Artificial Sequence: Synthetic oligonucleotide
aagauuccgggaguuggug

SEQ ID NO: 1967 - RNA, 19 nt, Artificial Sequence
  Description of Artificial Sequence: Synthetic oligonucleotide
gucugaauucucccgcaug

SEQ ID NO: 1968 - RNA, 19 nt, Artificial Sequence
  Description of Artificial Sequence: Synthetic oligonucleotide
ggccagggacccccagcgc

SEQ ID NO: 1969 - RNA, 19 nt, Artificial Sequence
  Description of Artificial Sequence: Synthetic oligonucleotide
cuuuguggucauccagaau

SEQ ID NO: 1970 - RNA, 19 nt, Artificial Sequence
  Description of Artificial Sequence: Synthetic oligonucleotide
ugaggacuugggcccagcc

SEQ ID NO: 1971 - RNA, 19 nt, Artificial Sequence
  Description of Artificial Sequence: Synthetic oligonucleotide
cagucccuuggacagcacc

SEQ ID NO: 1972 - RNA, 19 nt, Artificial Sequence
  Description of Artificial Sequence: Synthetic oligonucleotide
cuucuaccgcucacugcug

SEQ ID NO: 1973 - RNA, 19 nt, Artificial Sequence
  Description of Artificial Sequence: Synthetic oligonucleotide
ggaggacgaugacaugggg

SEQ ID NO: 1974 - RNA, 19 nt, Artificial Sequence
  Description of Artificial Sequence: Synthetic oligonucleotide
ggaccugguggaugcugag

SEQ ID NO: 1975 - RNA, 19 nt, Artificial Sequence
  Description of Artificial Sequence: Synthetic oligonucleotide
ggaguaucugguaccccag

SEQ ID NO: 1976 - RNA, 19 nt, Artificial Sequence
  Description of Artificial Sequence: Synthetic oligonucleotide
gcagggcuucuucugucca

SEQ ID NO: 1977 - RNA, 19 nt, Artificial Sequence
  Description of Artificial Sequence: Synthetic oligonucleotide
agacccugccccgggcgcu

SEQ ID NO: 1978 - RNA, 19 nt, Artificial Sequence
  Description of Artificial Sequence: Synthetic oligonucleotide
ugggggcaugguccaccac

SEQ ID NO: 1979 - RNA, 19 nt, Artificial Sequence
  Description of Artificial Sequence: Synthetic oligonucleotide
caggcaccgcagcucaucu

SEQ ID NO: 1980 - RNA, 19 nt, Artificial Sequence
  Description of Artificial Sequence: Synthetic oligonucleotide
uaccaggaguggcgguggg

SEQ ID NO: 1981 - RNA, 19 nt, Artificial Sequence
  Description of Artificial Sequence: Synthetic oligonucleotide
ggaccugacacuagggcug

SEQ ID NO: 1982 - RNA, 19 nt, Artificial Sequence
  Description of Artificial Sequence: Synthetic oligonucleotide
ggagcccucugaagaggag

SEQ ID NO: 1983 - RNA, 19 nt, Artificial Sequence
  Description of Artificial Sequence: Synthetic oligonucleotide
ggcccccaggucuccacug

SEQ ID NO: 1984 - RNA, 19 nt, Artificial Sequence
  Description of Artificial Sequence: Synthetic oligonucleotide
ggcacccuccgaaggggcu

SEQ ID NO: 1985 - RNA, 19 nt, Artificial Sequence
  Description of Artificial Sequence: Synthetic oligonucleotide
uggcuccgauguauuugau

SEQ ID NO: 1986 - RNA, 19 nt, Artificial Sequence
  Description of Artificial Sequence: Synthetic oligonucleotide
uggugaccugggaaugggg

SEQ ID NO: 1987 - RNA, 19 nt, Artificial Sequence
  Description of Artificial Sequence: Synthetic oligonucleotide
ggcagccaaggggcugcaa

SEQ ID NO: 1988 - RNA, 19 nt, Artificial Sequence
  Description of Artificial Sequence: Synthetic oligonucleotide
aagccuccccacacaugac

SEQ ID NO: 1989 - RNA, 19 nt, Artificial Sequence
  Description of Artificial Sequence: Synthetic oligonucleotide
ccccagcccucuacagcgg

SEQ ID NO: 1990 - RNA, 19 nt, Artificial Sequence
  Description of Artificial Sequence: Synthetic oligonucleotide
guacagugaggaccccaca

SEQ ID NO: 1991 - RNA, 19 nt, Artificial Sequence
  Description of Artificial Sequence: Synthetic oligonucleotide
aguaccccugcccucugag

SEQ ID NO: 1992 - RNA, 19 nt, Artificial Sequence
  Description of Artificial Sequence: Synthetic oligonucleotide
gacugauggcuacguugcc

SEQ ID NO: 1993 - RNA, 19 nt, Artificial Sequence
  Description of Artificial Sequence: Synthetic oligonucleotide
cccccugaccugcagcccc

SEQ ID NO: 1994 - RNA, 19 nt, Artificial Sequence
  Description of Artificial Sequence: Synthetic oligonucleotide
ccagccugaauaugugaac

SEQ ID NO: 1995 - RNA, 19 nt, Artificial Sequence
  Description of Artificial Sequence: Synthetic oligonucleotide
ccagccagauguucggccc

SEQ ID NO: 1996 - RNA, 19 nt, Artificial Sequence
  Description of Artificial Sequence: Synthetic oligonucleotide
ccagcccccuucgccccga

SEQ ID NO: 1997 - RNA, 19 nt, Artificial Sequence
  Description of Artificial Sequence: Synthetic oligonucleotide
agagggcccucugccugcu

SEQ ID NO: 1998 - RNA, 19 nt, Artificial Sequence
  Description of Artificial Sequence: Synthetic oligonucleotide
ugcccgaccugcuggugcc

SEQ ID NO: 1999 - RNA, 19 nt, Artificial Sequence
  Description of Artificial Sequence: Synthetic oligonucleotide
cacucuggaaaggcccaag

SEQ ID NO: 2000 - RNA, 19 nt, Artificial Sequence
  Description of Artificial Sequence: Synthetic oligonucleotide
gacucucuccccagggaag

SEQ ID NO: 2001 - RNA, 19 nt, Artificial Sequence
  Description of Artificial Sequence: Synthetic oligonucleotide
gaauggggucgucaaagac

SEQ ID NO: 2002 - RNA, 19 nt, Artificial Sequence
  Description of Artificial Sequence: Synthetic oligonucleotide
cguuuuugccuuugggggu

SEQ ID NO: 2003 - RNA, 19 nt, Artificial Sequence
  Description of Artificial Sequence: Synthetic oligonucleotide
ugccguggagaaccccgag

SEQ ID NO: 2004 - RNA, 19 nt, Artificial Sequence
  Description of Artificial Sequence: Synthetic oligonucleotide
guacuugacaccccaggga

SEQ ID NO: 2005 - RNA, 19 nt, Artificial Sequence
  Description of Artificial Sequence: Synthetic oligonucleotide
aggagcugccccucagccc

SEQ ID NO: 2006 - RNA, 19 nt, Artificial Sequence
  Description of Artificial Sequence: Synthetic oligonucleotide
ccacccuccuccugccuuc

SEQ ID NO: 2007 - RNA, 19 nt, Artificial Sequence
  Description of Artificial Sequence: Synthetic oligonucleotide
cagcccagccuucgacaac

SEQ ID NO: 2008 - RNA, 19 nt, Artificial Sequence
  Description of Artificial Sequence: Synthetic oligonucleotide
ccucuauuacugggaccag

SEQ ID NO: 2009 - RNA, 19 nt, Artificial Sequence
  Description of Artificial Sequence: Synthetic oligonucleotide
ggacccaccagagcggggg

SEQ ID NO: 2010 - RNA, 19 nt, Artificial Sequence
  Description of Artificial Sequence: Synthetic oligonucleotide
ggcuccacccagcaccuuc

SEQ ID NO: 2011 - RNA, 19 nt, Artificial Sequence
  Description of Artificial Sequence: Synthetic oligonucleotide
caaagggacaccuacggca

SEQ ID NO: 2012 - RNA, 19 nt, Artificial Sequence
  Description of Artificial Sequence: Synthetic oligonucleotide
agagaacccagaguaccug

SEQ ID NO: 2013 - RNA, 19 nt, Artificial Sequence
  Description of Artificial Sequence: Synthetic oligonucleotide
gggucuggacgugccagug

SEQ ID NO: 2014 - RNA, 19 nt, Artificial Sequence
  Description of Artificial Sequence: Synthetic oligonucleotide
gugaaccagaaggccaagu

SEQ ID NO: 2015 - RNA, 19 nt, Artificial Sequence
  Description of Artificial Sequence: Synthetic oligonucleotide
uccgcagaagcccugaugu

SEQ ID NO: 2016 - RNA, 19 nt, Artificial Sequence
  Description of Artificial Sequence: Synthetic oligonucleotide
uguccucagggagcaggga

SEQ ID NO: 2017 - RNA, 19 nt, Artificial Sequence
  Description of Artificial Sequence: Synthetic oligonucleotide
aaggccugacuucugcugg

SEQ ID NO: 2018 - RNA, 19 nt, Artificial Sequence
  Description of Artificial Sequence: Synthetic oligonucleotide
gcaucaagaggugggaggg

SEQ ID NO: 2019 - RNA, 19 nt, Artificial Sequence
  Description of Artificial Sequence: Synthetic oligonucleotide
gcccuccgaccacuuccag

SEQ ID NO: 2020 - RNA, 19 nt, Artificial Sequence
  Description of Artificial Sequence: Synthetic oligonucleotide
ggggaaccugccaugccag

SEQ ID NO: 2021 - RNA, 19 nt, Artificial Sequence
  Description of Artificial Sequence: Synthetic oligonucleotide
ggaaccuguccuaaggaac

SEQ ID NO: 2022 - RNA, 19 nt, Artificial Sequence
  Description of Artificial Sequence: Synthetic oligonucleotide
ccuuccuuccugcuugagu

SEQ ID NO: 2023 - RNA, 19 nt, Artificial Sequence
  Description of Artificial Sequence: Synthetic oligonucleotide
uucccagauggcuggaagg

SEQ ID NO: 2024 - RNA, 19 nt, Artificial Sequence
  Description of Artificial Sequence: Synthetic oligonucleotide
ggguccagccucguuggaa

SEQ ID NO: 2025 - RNA, 19 nt, Artificial Sequence
  Description of Artificial Sequence: Synthetic oligonucleotide
agaggaacagcacugggga

SEQ ID NO: 2026 - RNA, 19 nt, Artificial Sequence
  Description of Artificial Sequence: Synthetic oligonucleotide
agucuuuguggauucugag

SEQ ID NO: 2027 - RNA, 19 nt, Artificial Sequence
  Description of Artificial Sequence: Synthetic oligonucleotide
ggcccugcccaaugagacu

SEQ ID NO: 2028 - RNA, 19 nt, Artificial Sequence
  Description of Artificial Sequence: Synthetic oligonucleotide
ucuaggguccaguggaugc

SEQ ID NO: 2029 - RNA, 19 nt, Artificial Sequence
  Description of Artificial Sequence: Synthetic oligonucleotide
ccacagcccagcuuggccc

SEQ ID NO: 2030 - RNA, 19 nt, Artificial Sequence
  Description of Artificial Sequence: Synthetic oligonucleotide
cuuuccuuccagauccugg

SEQ ID NO: 2031 - RNA, 19 nt, Artificial Sequence
  Description of Artificial Sequence: Synthetic oligonucleotide
gguacugaaagccuuaggg

SEQ ID NO: 2032 - RNA, 19 nt, Artificial Sequence
  Description of Artificial Sequence: Synthetic oligonucleotide
gaagcuggccugagagggg

SEQ ID NO: 2033 - RNA, 19 nt, Artificial Sequence
  Description of Artificial Sequence: Synthetic oligonucleotide
gaagcggcccuaagggagu

SEQ ID NO: 2034 - RNA, 19 nt, Artificial Sequence
  Description of Artificial Sequence: Synthetic oligonucleotide
ugucuaagaacaaaagcga

SEQ ID NO: 2035 - RNA, 19 nt, Artificial Sequence
  Description of Artificial Sequence: Synthetic oligonucleotide
acccauucagagacugucc

SEQ ID NO: 2036 - RNA, 19 nt, Artificial Sequence
  Description of Artificial Sequence: Synthetic oligonucleotide
ccugaaaccuaguacugcc

SEQ ID NO: 2037 - RNA, 19 nt, Artificial Sequence
  Description of Artificial Sequence: Synthetic oligonucleotide
cccccaugaggaaggaaca

SEQ ID NO: 2038 - RNA, 19 nt, Artificial Sequence
  Description of Artificial Sequence: Synthetic oligonucleotide
agcaauggugucaguaucc

SEQ ID NO: 2039 - RNA, 19 nt, Artificial Sequence
  Description of Artificial Sequence: Synthetic oligonucleotide
caggcuuuguacagagugc

SEQ ID NO: 2040 - RNA, 19 nt, Artificial Sequence
  Description of Artificial Sequence: Synthetic oligonucleotide
cuuuucuguuuaguuuuua

SEQ ID NO: 2041 - RNA, 19 nt, Artificial Sequence
  Description of Artificial Sequence: Synthetic oligonucleotide
acuuuuuuuguuuuguuuu

SEQ ID NO: 2042 - RNA, 19 nt, Artificial Sequence
  Description of Artificial Sequence: Synthetic oligonucleotide
uuuuaaagaugaaauaaag

SEQ ID NO: 2043 - RNA, 19 nt, Artificial Sequence
  Description of Artificial Sequence: Synthetic oligonucleotide
gacccagggggagaauggg

SEQ ID NO: 2044 - RNA, 19 nt, Artificial Sequence
  Description of Artificial Sequence: Synthetic oligonucleotide
guguuguauggggaggcaa

SEQ ID NO: 2045 - RNA, 19 nt, Artificial Sequence
  Description of Artificial Sequence: Synthetic oligonucleotide
agugugggggguccuucuc

SEQ ID NO: 2046 - RNA, 19 nt, Artificial Sequence
  Description of Artificial Sequence: Synthetic oligonucleotide
ccacacccacuuuguccau

SEQ ID NO: 2047 - RNA, 19 nt, Artificial Sequence
  Description of Artificial Sequence: Synthetic oligonucleotide
uuugcaaauauauuuugga

SEQ ID NO: 2048 - RNA, 19 nt, Artificial Sequence
  Description of Artificial Sequence: Synthetic oligonucleotide
auauuuuggaaaacagcua

SEQ ID NO: 2049 - RNA, 19 nt, Artificial Sequence
  Description of Artificial Sequence: Synthetic oligonucleotide
ggaggagguggaggaggag

SEQ ID NO: 2050 - RNA, 19 nt, Artificial Sequence
  Description of Artificial Sequence: Synthetic oligonucleotide
gggcugcuugaggaaguau

SEQ ID NO: 2051 - RNA, 19 nt, Artificial Sequence
  Description of Artificial Sequence: Synthetic oligonucleotide
uaagaaugaaguugugaag

SEQ ID NO: 2052 - RNA, 19 nt, Artificial Sequence
  Description of Artificial Sequence: Synthetic oligonucleotide
gcugagauuccccuccauu

SEQ ID NO: 2053 - RNA, 19 nt, Artificial Sequence
  Description of Artificial Sequence: Synthetic oligonucleotide
ugggaccggagaaaccagg

SEQ ID NO: 2054 - RNA, 19 nt, Artificial Sequence
  Description of Artificial Sequence: Synthetic oligonucleotide
gggagccccccgggcagcc

SEQ ID NO: 2055 - RNA, 19 nt, Artificial Sequence
  Description of Artificial Sequence: Synthetic oligonucleotide
cgcgcgccccuucccacgg

SEQ ID NO: 2056 - RNA, 19 nt, Artificial Sequence
  Description of Artificial Sequence: Synthetic oligonucleotide
gggcccuuuacugcgccgc

SEQ ID NO: 2057 - RNA, 19 nt, Artificial Sequence
  Description of Artificial Sequence: Synthetic oligonucleotide
cgcgcccggcccccacccc

SEQ ID NO: 2058 - RNA, 19 nt, Artificial Sequence
  Description of Artificial Sequence: Synthetic oligonucleotide
cucgcagcaccccgcgccc

SEQ ID NO: 2059 - RNA, 19 nt, Artificial Sequence
  Description of Artificial Sequence: Synthetic oligonucleotide
ccgcgcccucccagccggg

SEQ ID NO: 2060 - RNA, 19 nt, Artificial Sequence
  Description of Artificial Sequence: Synthetic oligonucleotide
guccagccggagccauggg

SEQ ID NO: 2061 - RNA, 19 nt, Artificial Sequence
  Description of Artificial Sequence: Synthetic oligonucleotide
ggccggagccgcagugagc

SEQ ID NO: 2062 - RNA, 19 nt, Artificial Sequence
  Description of Artificial Sequence: Synthetic oligonucleotide
caccauggagcuggcggcc

SEQ ID NO: 2063 - RNA, 19 nt, Artificial Sequence
  Description of Artificial Sequence: Synthetic oligonucleotide
cuugugccgcugggggcuc

SEQ ID NO: 2064 - RNA, 19 nt, Artificial Sequence
  Description of Artificial Sequence: Synthetic oligonucleotide
ccuccucgcccucuugccc

SEQ ID NO: 2065 - RNA, 19 nt, Artificial Sequence
  Description of Artificial Sequence: Synthetic oligonucleotide
ccccggagccgcgagcacc

SEQ ID NO: 2066 - RNA, 19 nt, Artificial Sequence
  Description of Artificial Sequence: Synthetic oligonucleotide
ccaagugugcaccggcaca

SEQ ID NO: 2067 - RNA, 19 nt, Artificial Sequence
  Description of Artificial Sequence: Synthetic oligonucleotide
agacaugaagcugcggcuc

SEQ ID NO: 2068 - RNA, 19 nt, Artificial Sequence
  Description of Artificial Sequence: Synthetic oligonucleotide
cccugccagucccgagacc

SEQ ID NO: 2069 - RNA, 19 nt, Artificial Sequence
  Description of Artificial Sequence: Synthetic oligonucleotide
ccaccuggacaugcuccgc

SEQ ID NO: 2070 - RNA, 19 nt, Artificial Sequence
  Description of Artificial Sequence: Synthetic oligonucleotide
ccaccucuaccagggcugc

SEQ ID NO: 2071 - RNA, 19 nt, Artificial Sequence
  Description of Artificial Sequence: Synthetic oligonucleotide
ccagguggugcagggaaac

SEQ ID NO: 2072 - RNA, 19 nt, Artificial Sequence
  Description of Artificial Sequence: Synthetic oligonucleotide
ccuggaacucaccuaccug

SEQ ID NO: 2073 - RNA, 19 nt, Artificial Sequence
  Description of Artificial Sequence: Synthetic oligonucleotide
gcccaccaaugccagccug

SEQ ID NO: 2074 - RNA, 19 nt, Artificial Sequence
  Description of Artificial Sequence: Synthetic oligonucleotide
guccuuccugcaggauauc

SEQ ID NO: 2075 - RNA, 19 nt, Artificial Sequence
  Description of Artificial Sequence: Synthetic oligonucleotide
ccaggaggugcagggcuac

SEQ ID NO: 2076 - RNA, 19 nt, Artificial Sequence
  Description of Artificial Sequence: Synthetic oligonucleotide
cgugcucaucgcucacaac

SEQ ID NO: 2077 - RNA, 19 nt, Artificial Sequence
  Description of Artificial Sequence: Synthetic oligonucleotide
ccaagugaggcagguccca

SEQ ID NO: 2078 - RNA, 19 nt, Artificial Sequence
  Description of Artificial Sequence: Synthetic oligonucleotide
acugcagaggcugcggauu

SEQ ID NO: 2079 - RNA, 19 nt, Artificial Sequence
  Description of Artificial Sequence: Synthetic oligonucleotide
ugugcgaggcacccagcuc

SEQ ID NO: 2080 - RNA, 19 nt, Artificial Sequence
  Description of Artificial Sequence: Synthetic oligonucleotide
cuuugaggacaacuaugcc

SEQ ID NO: 2081 - RNA, 19 nt, Artificial Sequence
  Description of Artificial Sequence: Synthetic oligonucleotide
ccuggccgugcuagacaau

SEQ ID NO: 2082 - RNA, 19 nt, Artificial Sequence
  Description of Artificial Sequence: Synthetic oligonucleotide
uggagacccgcugaacaau

SEQ ID NO: 2083 - RNA, 19 nt, Artificial Sequence
  Description of Artificial Sequence: Synthetic oligonucleotide
uaccaccccugucacaggg

SEQ ID NO: 2084 - RNA, 19 nt, Artificial Sequence
  Description of Artificial Sequence: Synthetic oligonucleotide
ggccuccccaggaggccug

SEQ ID NO: 2085 - RNA, 19 nt, Artificial Sequence
  Description of Artificial Sequence: Synthetic oligonucleotide
gcgggagcugcagcuucga

SEQ ID NO: 2086 - RNA, 19 nt, Artificial Sequence
  Description of Artificial Sequence: Synthetic oligonucleotide
aagccucacagagaucuug

SEQ ID NO: 2087 - RNA, 19 nt, Artificial Sequence
  Description of Artificial Sequence: Synthetic oligonucleotide
gaaaggaggggucuugauc

SEQ ID NO: 2088 - RNA, 19 nt, Artificial Sequence
  Description of Artificial Sequence: Synthetic oligonucleotide
ccagcggaacccccagcuc

SEQ ID NO: 2089 - RNA, 19 nt, Artificial Sequence
  Description of Artificial Sequence: Synthetic oligonucleotide
cugcuaccaggacacgauu

SEQ ID NO: 2090 - RNA, 19 nt, Artificial Sequence
  Description of Artificial Sequence: Synthetic oligonucleotide
uuuguggaaggacaucuuc

SEQ ID NO: 2091 - RNA, 19 nt, Artificial Sequence
  Description of Artificial Sequence: Synthetic oligonucleotide
ccacaagaacaaccagcug

SEQ ID NO: 2092 - RNA, 19 nt, Artificial Sequence
  Description of Artificial Sequence: Synthetic oligonucleotide
ggcucucacacugauagac

SEQ ID NO: 2093 - RNA, 19 nt, Artificial Sequence
  Description of Artificial Sequence: Synthetic oligonucleotide
caccaaccgcucucgggcc

SEQ ID NO: 2094 - RNA, 19 nt, Artificial Sequence
  Description of Artificial Sequence: Synthetic oligonucleotide
cugccaccccuguucuccg

SEQ ID NO: 2095 - RNA, 19 nt, Artificial Sequence
  Description of Artificial Sequence: Synthetic oligonucleotide
gauguguaagggcucccgc

SEQ ID NO: 2096 - RNA, 19 nt, Artificial Sequence
  Description of Artificial Sequence: Synthetic oligonucleotide
cugcuggggagagaguucu

SEQ ID NO: 2097 - RNA, 19 nt, Artificial Sequence
  Description of Artificial Sequence: Synthetic oligonucleotide
ugaggauugucagagccug

SEQ ID NO: 2098 - RNA, 19 nt, Artificial Sequence
  Description of Artificial Sequence: Synthetic oligonucleotide
gacgcgcacugucugugcc

SEQ ID NO: 2099 - RNA, 19 nt, Artificial Sequence
  Description of Artificial Sequence: Synthetic oligonucleotide
cgguggcugugcccgcugc

SEQ ID NO: 2100 - RNA, 19 nt, Artificial Sequence
  Description of Artificial Sequence: Synthetic oligonucleotide
caaggggccacugcccacu

SEQ ID NO: 2101 - RNA, 19 nt, Artificial Sequence
  Description of Artificial Sequence: Synthetic oligonucleotide
ugacugcugccaugagcag

SEQ ID NO: 2102 - RNA, 19 nt, Artificial Sequence
  Description of Artificial Sequence: Synthetic oligonucleotide
gugugcugccggcugcacg

SEQ ID NO: 2103 - RNA, 19 nt, Artificial Sequence
  Description of Artificial Sequence: Synthetic oligonucleotide
gggccccaagcacucugac

SEQ ID NO: 2104 - RNA, 19 nt, Artificial Sequence
  Description of Artificial Sequence: Synthetic oligonucleotide
cugccuggccugccuccac

SEQ ID NO: 2105 - RNA, 19 nt, Artificial Sequence
  Description of Artificial Sequence: Synthetic oligonucleotide
cuucaaccacaguggcauc

SEQ ID NO: 2106 - RNA, 19 nt, Artificial Sequence
  Description of Artificial Sequence: Synthetic oligonucleotide
cugugagcugcacugccca

SEQ ID NO: 2107 - RNA, 19 nt, Artificial Sequence
  Description of Artificial Sequence: Synthetic oligonucleotide
agcccuggucaccuacaac

SEQ ID NO: 2108 - RNA, 19 nt, Artificial Sequence
  Description of Artificial Sequence: Synthetic oligonucleotide
cacagacacguuugagucc

SEQ ID NO: 2109 - RNA, 19 nt, Artificial Sequence
  Description of Artificial Sequence: Synthetic oligonucleotide
caugcccaaucccgagggc

SEQ ID NO: 2110 - RNA, 19 nt, Artificial Sequence
  Description of Artificial Sequence: Synthetic oligonucleotide
ccgguauacauucggcgcc

SEQ ID NO: 2111 - RNA, 19 nt, Artificial Sequence
  Description of Artificial Sequence: Synthetic oligonucleotide
cagcugugugacugccugu

SEQ ID NO: 2112 - RNA, 19 nt, Artificial Sequence
  Description of Artificial Sequence: Synthetic oligonucleotide
ucccuacaacuaccuuucu

SEQ ID NO: 2113 - RNA, 19 nt, Artificial Sequence
  Description of Artificial Sequence: Synthetic oligonucleotide
uacggacgugggauccugc

SEQ ID NO: 2114 - RNA, 19 nt, Artificial Sequence
  Description of Artificial Sequence: Synthetic oligonucleotide
cacccucgucugcccccug

SEQ ID NO: 2115 - RNA, 19 nt, Artificial Sequence
  Description of Artificial Sequence: Synthetic oligonucleotide
gcacaaccaagaggugaca

SEQ ID NO: 2116 - RNA, 19 nt, Artificial Sequence
  Description of Artificial Sequence: Synthetic oligonucleotide
agcagaggauggaacacag

SEQ ID NO: 2117 - RNA, 19 nt, Artificial Sequence
  Description of Artificial Sequence: Synthetic oligonucleotide
gcggugugagaagugcagc

SEQ ID NO: 2118 - RNA, 19 nt, Artificial Sequence
  Description of Artificial Sequence: Synthetic oligonucleotide
caagcccugugcccgagug

SEQ ID NO: 2119 - RNA, 19 nt, Artificial Sequence
  Description of Artificial Sequence: Synthetic oligonucleotide
gugcuauggucugggcaug

SEQ ID NO: 2120 - RNA, 19 nt, Artificial Sequence
  Description of Artificial Sequence: Synthetic oligonucleotide
ggagcacuugcgagaggug

SEQ ID NO: 2121 - RNA, 19 nt, Artificial Sequence
  Description of Artificial Sequence: Synthetic oligonucleotide
gagggcaguuaccagugcc

SEQ ID NO: 2122 - RNA, 19 nt, Artificial Sequence
  Description of Artificial Sequence: Synthetic oligonucleotide
caauauccaggaguuugcu

SEQ ID NO: 2123 - RNA, 19 nt, Artificial Sequence
  Description of Artificial Sequence: Synthetic oligonucleotide
uggcugcaagaagaucuuu

SEQ ID NO: 2124 - RNA, 19 nt, Artificial Sequence
  Description of Artificial Sequence: Synthetic oligonucleotide
ugggagccuggcauuucug

SEQ ID NO: 2125 - RNA, 19 nt, Artificial Sequence
  Description of Artificial Sequence: Synthetic oligonucleotide
gccggagagcuuugauggg

SEQ ID NO: 2126 - RNA, 19 nt, Artificial Sequence
  Description of Artificial Sequence: Synthetic oligonucleotide
ggacccagccuccaacacu

SEQ ID NO: 2127 - RNA, 19 nt, Artificial Sequence
  Description of Artificial Sequence: Synthetic oligonucleotide
ugccccgcuccagccagag

SEQ ID NO: 2128 - RNA, 19 nt, Artificial Sequence
  Description of Artificial Sequence: Synthetic oligonucleotide
gcagcuccaaguguuugag

SEQ ID NO: 2129 - RNA, 19 nt, Artificial Sequence
  Description of Artificial Sequence: Synthetic oligonucleotide
gacucuggaagagaucaca

SEQ ID NO: 2130 - RNA, 19 nt, Artificial Sequence
  Description of Artificial Sequence: Synthetic oligonucleotide
agguuaccuauacaucuca

SEQ ID NO: 2131 - RNA, 19 nt, Artificial Sequence
  Description of Artificial Sequence: Synthetic oligonucleotide
agcauggccggacagccug

SEQ ID NO: 2132 - RNA, 19 nt, Artificial Sequence
  Description of Artificial Sequence: Synthetic oligonucleotide
gccugaccucagcgucuuc

SEQ ID NO: 2133 - RNA, 19 nt, Artificial Sequence
  Description of Artificial Sequence: Synthetic oligonucleotide
ccagaaccugcaaguaauc

SEQ ID NO: 2134 - RNA, 19 nt, Artificial Sequence
  Description of Artificial Sequence: Synthetic oligonucleotide
ccggggacgaauucugcac

SEQ ID NO: 2135 - RNA, 19 nt, Artificial Sequence
  Description of Artificial Sequence: Synthetic oligonucleotide
caauggcgccuacucgcug

SEQ ID NO: 2136 - RNA, 19 nt, Artificial Sequence
  Description of Artificial Sequence: Synthetic oligonucleotide
gacccugcaagggcugggc

SEQ ID NO: 2137 - RNA, 19 nt, Artificial Sequence
  Description of Artificial Sequence: Synthetic oligonucleotide
caucagcuggcuggggcug

SEQ ID NO: 2138 - RNA, 19 nt, Artificial Sequence
  Description of Artificial Sequence: Synthetic oligonucleotide
gcgcucacugagggaacug

SEQ ID NO: 2139 - RNA, 19 nt, Artificial Sequence
  Description of Artificial Sequence: Synthetic oligonucleotide
gggcaguggacuggcccuc

SEQ ID NO: 2140 - RNA, 19 nt, Artificial Sequence
  Description of Artificial Sequence: Synthetic oligonucleotide
cauccaccauaacacccac

SEQ ID NO: 2141 - RNA, 19 nt, Artificial Sequence
  Description of Artificial Sequence: Synthetic oligonucleotide
ccucugcuucgugcacacg

SEQ ID NO: 2142 - RNA, 19 nt, Artificial Sequence
  Description of Artificial Sequence: Synthetic oligonucleotide
ggugcccugggaccagcuc

SEQ ID NO: 2143 - RNA, 19 nt, Artificial Sequence
  Description of Artificial Sequence: Synthetic oligonucleotide
cuuucggaacccgcaccaa

SEQ ID NO: 2144 - RNA, 19 nt, Artificial Sequence
  Description of Artificial Sequence: Synthetic oligonucleotide
agcucugcuccacacugcc

SEQ ID NO: 2145 - RNA, 19 nt, Artificial Sequence
  Description of Artificial Sequence: Synthetic oligonucleotide
caaccggccagaggacgag

SEQ ID NO: 2146 - RNA, 19 nt, Artificial Sequence
  Description of Artificial Sequence: Synthetic oligonucleotide
gugugugggcgagggccug

SEQ ID NO: 2147 - RNA, 19 nt, Artificial Sequence
  Description of Artificial Sequence: Synthetic oligonucleotide
ggccugccaccagcugugc

SEQ ID NO: 2148 - RNA, 19 nt, Artificial Sequence
  Description of Artificial Sequence: Synthetic oligonucleotide
cgcccgagggcacugcugg

SEQ ID NO: 2149 - RNA, 19 nt, Artificial Sequence
  Description of Artificial Sequence: Synthetic oligonucleotide
ggguccagggcccacccag

SEQ ID NO: 2150 - RNA, 19 nt, Artificial Sequence
  Description of Artificial Sequence: Synthetic oligonucleotide
gugugucaacugcagccag

SEQ ID NO: 2151 - RNA, 19 nt, Artificial Sequence
  Description of Artificial Sequence: Synthetic oligonucleotide
guuccuucggggccaggag

SEQ ID NO: 2152 - RNA, 19 nt, Artificial Sequence
  Description of Artificial Sequence: Synthetic oligonucleotide
gugcguggaggaaugccga

SEQ ID NO: 2153 - RNA, 19 nt, Artificial Sequence
  Description of Artificial Sequence: Synthetic oligonucleotide
aguacugcaggggcucccc

SEQ ID NO: 2154 - RNA, 19 nt, Artificial Sequence
  Description of Artificial Sequence: Synthetic oligonucleotide
cagggaguaugugaaugcc

SEQ ID NO: 2155 - RNA, 19 nt, Artificial Sequence
  Description of Artificial Sequence: Synthetic oligonucleotide
caggcacuguuugccgugc

SEQ ID NO: 2156 - RNA, 19 nt, Artificial Sequence
  Description of Artificial Sequence: Synthetic oligonucleotide
ccacccugagugucagccc

SEQ ID NO: 2157 - RNA, 19 nt, Artificial Sequence
  Description of Artificial Sequence: Synthetic oligonucleotide
ccagaauggcucagugacc

SEQ ID NO: 2158 - RNA, 19 nt, Artificial Sequence
  Description of Artificial Sequence: Synthetic oligonucleotide
cuguuuuggaccggaggcu

SEQ ID NO: 2159 - RNA, 19 nt, Artificial Sequence
  Description of Artificial Sequence: Synthetic oligonucleotide
ugaccaguguguggccugu

SEQ ID NO: 2160 - RNA, 19 nt, Artificial Sequence
  Description of Artificial Sequence: Synthetic oligonucleotide
ugcccacuauaaggacccu

SEQ ID NO: 2161 - RNA, 19 nt, Artificial Sequence
  Description of Artificial Sequence: Synthetic oligonucleotide
ucccuucugcguggcccgc

SEQ ID NO: 2162 - RNA, 19 nt, Artificial Sequence
  Description of Artificial Sequence: Synthetic oligonucleotide
cugccccagcggugugaaa

SEQ ID NO: 2163 - RNA, 19 nt, Artificial Sequence
  Description of Artificial Sequence: Synthetic oligonucleotide
accugaccucuccuacaug

SEQ ID NO: 2164 - RNA, 19 nt, Artificial Sequence
  Description of Artificial Sequence: Synthetic oligonucleotide
gcccaucuggaaguuucca

SEQ ID NO: 2165 - RNA, 19 nt, Artificial Sequence
  Description of Artificial Sequence: Synthetic oligonucleotide
agaugaggagggcgcaugc

SEQ ID NO: 2166 - RNA, 19 nt, Artificial Sequence
  Description of Artificial Sequence: Synthetic oligonucleotide
ccagccuugccccaucaac

SEQ ID NO: 2167 - RNA, 19 nt, Artificial Sequence
  Description of Artificial Sequence: Synthetic oligonucleotide
cugcacccacuccugugug

SEQ ID NO: 2168 - RNA, 19 nt, Artificial Sequence
  Description of Artificial Sequence: Synthetic oligonucleotide
ggaccuggaugacaagggc

SEQ ID NO: 2169 - RNA, 19 nt, Artificial Sequence
  Description of Artificial Sequence: Synthetic oligonucleotide
cugccccgccgagcagaga

SEQ ID NO: 2170 - RNA, 19 nt, Artificial Sequence
  Description of Artificial Sequence: Synthetic oligonucleotide
agccagcccucugacgucc

SEQ ID NO: 2171 - RNA, 19 nt, Artificial Sequence
  Description of Artificial Sequence: Synthetic oligonucleotide
caucaucucugcggugguu

SEQ ID NO: 2172 - RNA, 19 nt, Artificial Sequence
  Description of Artificial Sequence: Synthetic oligonucleotide
uggcauucugcuggucgug

SEQ ID NO: 2173 - RNA, 19 nt, Artificial Sequence
  Description of Artificial Sequence: Synthetic oligonucleotide
ggucuuggggguggucuuu

SEQ ID NO: 2174 - RNA, 19 nt, Artificial Sequence
  Description of Artificial Sequence: Synthetic oligonucleotide
ugggauccucaucaagcga

SEQ ID NO: 2175 - RNA, 19 nt, Artificial Sequence
  Description of Artificial Sequence: Synthetic oligonucleotide
acggcagcagaagauccgg

SEQ ID NO: 2176 - RNA, 19 nt, Artificial Sequence
  Description of Artificial Sequence: Synthetic oligonucleotide
gaaguacacgaugcggaga

SEQ ID NO: 2177 - RNA, 19 nt, Artificial Sequence
  Description of Artificial Sequence: Synthetic oligonucleotide
acugcugcaggaaacggag

SEQ ID NO: 2178 - RNA, 19 nt, Artificial Sequence
  Description of Artificial Sequence: Synthetic oligonucleotide
gcugguggagccgcugaca

SEQ ID NO: 2179 - RNA, 19 nt, Artificial Sequence
  Description of Artificial Sequence: Synthetic oligonucleotide
accuagcggagcgaugccc

SEQ ID NO: 2180 - RNA, 19 nt, Artificial Sequence
  Description of Artificial Sequence: Synthetic oligonucleotide
caaccaggcgcagaugcgg

SEQ ID NO: 2181 - RNA, 19 nt, Artificial Sequence
  Description of Artificial Sequence: Synthetic oligonucleotide
gauccugaaagagacggag

SEQ ID NO: 2182 - RNA, 19 nt, Artificial Sequence
  Description of Artificial Sequence: Synthetic oligonucleotide
gcugaggaaggugaaggug

SEQ ID NO: 2183 - RNA, 19 nt, Artificial Sequence
  Description of Artificial Sequence: Synthetic oligonucleotide
gcuuggaucuggcgcuuuu

SEQ ID NO: 2184 - RNA, 19 nt, Artificial Sequence
  Description of Artificial Sequence: Synthetic oligonucleotide
uggcacagucuacaagggc

SEQ ID NO: 2185 - RNA, 19 nt, Artificial Sequence
  Description of Artificial Sequence: Synthetic oligonucleotide
caucuggaucccugauggg

SEQ ID NO: 2186 - RNA, 19 nt, Artificial Sequence
  Description of Artificial Sequence: Synthetic oligonucleotide
ggagaaugugaaaauucca

SEQ ID NO: 2187 - RNA, 19 nt, Artificial Sequence
  Description of Artificial Sequence: Synthetic oligonucleotide
aguggccaucaaaguguug

SEQ ID NO: 2188 - RNA, 19 nt, Artificial Sequence
  Description of Artificial Sequence: Synthetic oligonucleotide
gagggaaaacacauccccc

SEQ ID NO: 2189 - RNA, 19 nt, Artificial Sequence
  Description of Artificial Sequence: Synthetic oligonucleotide
caaagccaacaaagaaauc

SEQ ID NO: 2190 - RNA, 19 nt, Artificial Sequence
  Description of Artificial Sequence: Synthetic oligonucleotide
cuuagacgaagcauacgug

SEQ ID NO: 2191 - RNA, 19 nt, Artificial Sequence
  Description of Artificial Sequence: Synthetic oligonucleotide
gauggcuggugugggcucc

SEQ ID NO: 2192 - RNA, 19 nt, Artificial Sequence
  Description of Artificial Sequence: Synthetic oligonucleotide
cccauaugucucccgccuu

SEQ ID NO: 2193 - RNA, 19 nt, Artificial Sequence
  Description of Artificial Sequence: Synthetic oligonucleotide
ucugggcaucugccugaca

SEQ ID NO: 2194 - RNA, 19 nt, Artificial Sequence
  Description of Artificial Sequence: Synthetic oligonucleotide
auccacggugcagcuggug

SEQ ID NO: 2195 - RNA, 19 nt, Artificial Sequence
  Description of Artificial Sequence: Synthetic oligonucleotide
gacacagcuuaugcccuau

SEQ ID NO: 2196 - RNA, 19 nt, Artificial Sequence
  Description of Artificial Sequence: Synthetic oligonucleotide
uggcugccucuuagaccau

SEQ ID NO: 2197 - RNA, 19 nt, Artificial Sequence
  Description of Artificial Sequence: Synthetic oligonucleotide
uguccgggaaaaccgcgga

SEQ ID NO: 2198 - RNA, 19 nt, Artificial Sequence
  Description of Artificial Sequence: Synthetic oligonucleotide
acgccugggcucccaggac

SEQ ID NO: 2199 - RNA, 19 nt, Artificial Sequence
  Description of Artificial Sequence: Synthetic oligonucleotide
ccugcugaacugguguaug

SEQ ID NO: 2200 - RNA, 19 nt, Artificial Sequence
  Description of Artificial Sequence: Synthetic oligonucleotide
gcagauugccaaggggaug

SEQ ID NO: 2201 - RNA, 19 nt, Artificial Sequence
  Description of Artificial Sequence: Synthetic oligonucleotide
gagcuaccuggaggaugug

SEQ ID NO: 2202 - RNA, 19 nt, Artificial Sequence
  Description of Artificial Sequence: Synthetic oligonucleotide
gcggcucguacacagggac

SEQ ID NO: 2203 - RNA, 19 nt, Artificial Sequence
  Description of Artificial Sequence: Synthetic oligonucleotide
cuuggccgcucggaacgug

SEQ ID NO: 2204 - RNA, 19 nt, Artificial Sequence
  Description of Artificial Sequence: Synthetic oligonucleotide
gcuggucaagagucccaac

SEQ ID NO: 2205 - RNA, 19 nt, Artificial Sequence
  Description of Artificial Sequence: Synthetic oligonucleotide
ccaugucaaaauuacagac

SEQ ID NO: 2206 - RNA, 19 nt, Artificial Sequence
  Description of Artificial Sequence: Synthetic oligonucleotide
cuucgggcuggcucggcug

SEQ ID NO: 2207 - RNA, 19 nt, Artificial Sequence
  Description of Artificial Sequence: Synthetic oligonucleotide
gcuggacauugacgagaca

SEQ ID NO: 2208 - RNA, 19 nt, Artificial Sequence
  Description of Artificial Sequence: Synthetic oligonucleotide
agaguaccaugcagauggg

SEQ ID NO: 2209 - RNA, 19 nt, Artificial Sequence
  Description of Artificial Sequence: Synthetic oligonucleotide
gggcaaggugcccaucaag

SEQ ID NO: 2210 - RNA, 19 nt, Artificial Sequence
  Description of Artificial Sequence: Synthetic oligonucleotide
guggauggcgcuggagucc

SEQ ID NO: 2211 - RNA, 19 nt, Artificial Sequence
  Description of Artificial Sequence: Synthetic oligonucleotide
cauucuccgccggcgguuc

SEQ ID NO: 2212 - RNA, 19 nt, Artificial Sequence
  Description of Artificial Sequence: Synthetic oligonucleotide
cacccaccagagugaugug

SEQ ID NO: 2213 - RNA, 19 nt, Artificial Sequence
  Description of Artificial Sequence: Synthetic oligonucleotide
guggaguuauggugugacu

SEQ ID NO: 2214 - RNA, 19 nt, Artificial Sequence
  Description of Artificial Sequence: Synthetic oligonucleotide
ugugugggagcugaugacu

SEQ ID NO: 2215 - RNA, 19 nt, Artificial Sequence
  Description of Artificial Sequence: Synthetic oligonucleotide
uuuuggggccaaaccuuac

SEQ ID NO: 2216 - RNA, 19 nt, Artificial Sequence
  Description of Artificial Sequence: Synthetic oligonucleotide
cgaugggaucccagcccgg

SEQ ID NO: 2217 - RNA, 19 nt, Artificial Sequence
  Description of Artificial Sequence: Synthetic oligonucleotide
ggagaucccugaccugcug

SEQ ID NO: 2218 - RNA, 19 nt, Artificial Sequence
  Description of Artificial Sequence: Synthetic oligonucleotide
ggaaaagggggagcggcug

SEQ ID NO: 2219 - RNA, 19 nt, Artificial Sequence
  Description of Artificial Sequence: Synthetic oligonucleotide
gccccagccccccaucugc

SEQ ID NO: 2220 - RNA, 19 nt, Artificial Sequence
  Description of Artificial Sequence: Synthetic oligonucleotide
caccauugaugucuacaug

SEQ ID NO: 2221 - RNA, 19 nt, Artificial Sequence
  Description of Artificial Sequence: Synthetic oligonucleotide
gaucauggucaaauguugg

SEQ ID NO: 2222 - RNA, 19 nt, Artificial Sequence
  Description of Artificial Sequence: Synthetic oligonucleotide
gaugauugacucugaaugu

SEQ ID NO: 2223 - RNA, 19 nt, Artificial Sequence
  Description of Artificial Sequence: Synthetic oligonucleotide
ucggccaagauuccgggag

SEQ ID NO: 2224 - RNA, 19 nt, Artificial Sequence
  Description of Artificial Sequence: Synthetic oligonucleotide
guuggugucugaauucucc

SEQ ID NO: 2225 - RNA, 19 nt, Artificial Sequence
  Description of Artificial Sequence: Synthetic oligonucleotide
ccgcauggccagggacccc

SEQ ID NO: 2226 - RNA, 19 nt, Artificial Sequence
  Description of Artificial Sequence: Synthetic oligonucleotide
ccagcgcuuuguggucauc

SEQ ID NO: 2227 - RNA, 19 nt, Artificial Sequence
  Description of Artificial Sequence: Synthetic oligonucleotide
ccagaaugaggacuugggc

SEQ ID NO: 2228 - RNA, 19 nt, Artificial Sequence
  Description of Artificial Sequence: Synthetic oligonucleotide
cccagccagucccuuggac

SEQ ID NO: 2229 - RNA, 19 nt, Artificial Sequence
  Description of Artificial Sequence: Synthetic oligonucleotide
cagcaccuucuaccgcuca

SEQ ID NO: 2230 - RNA, 19 nt, Artificial Sequence
  Description of Artificial Sequence: Synthetic oligonucleotide
acugcuggaggacgaugac

SEQ ID NO: 2231 - RNA, 19 nt, Artificial Sequence
  Description of Artificial Sequence: Synthetic oligonucleotide
caugggggaccugguggau

SEQ ID NO: 2232 - RNA, 19 nt, Artificial Sequence
  Description of Artificial Sequence: Synthetic oligonucleotide
ugcugaggaguaucuggua

SEQ ID NO: 2233 - RNA, 19 nt, Artificial Sequence
  Description of Artificial Sequence: Synthetic oligonucleotide
accccagcagggcuucuuc

SEQ ID NO: 2234 - RNA, 19 nt, Artificial Sequence
  Description of Artificial Sequence: Synthetic oligonucleotide
cuguccagacccugccccg

SEQ ID NO: 2235 - RNA, 19 nt, Artificial Sequence
  Description of Artificial Sequence: Synthetic oligonucleotide
gggcgcugggggcaugguc

SEQ ID NO: 2236 - RNA, 19 nt, Artificial Sequence
  Description of Artificial Sequence: Synthetic oligonucleotide
ccaccacaggcaccgcagc

SEQ ID NO: 2237 - RNA, 19 nt, Artificial Sequence
  Description of Artificial Sequence: Synthetic oligonucleotide
cucaucuaccaggaguggc

SEQ ID NO: 2238 - RNA, 19 nt, Artificial Sequence
  Description of Artificial Sequence: Synthetic oligonucleotide
cgguggggaccugacacua

SEQ ID NO: 2239 - RNA, 19 nt, Artificial Sequence
  Description of Artificial Sequence: Synthetic oligonucleotide
agggcuggagcccucugaa

SEQ ID NO: 2240 - RNA, 19 nt, Artificial Sequence
  Description of Artificial Sequence: Synthetic oligonucleotide
agaggaggcccccaggucu

SEQ ID NO: 2241 - RNA, 19 nt, Artificial Sequence
  Description of Artificial Sequence: Synthetic oligonucleotide
uccacuggcacccuccgaa

SEQ ID NO: 2242 - RNA, 19 nt, Artificial Sequence
  Description of Artificial Sequence: Synthetic oligonucleotide
aggggcuggcuccgaugua

SEQ ID NO: 2243 - RNA, 19 nt, Artificial Sequence
  Description of Artificial Sequence: Synthetic oligonucleotide
auuugauggugaccuggga

SEQ ID NO: 2244 - RNA, 19 nt, Artificial Sequence
  Description of Artificial Sequence: Synthetic oligonucleotide
aaugggggcagccaagggg

SEQ ID NO: 2245 - RNA, 19 nt, Artificial Sequence
  Description of Artificial Sequence: Synthetic oligonucleotide
gcugcaaagccuccccaca

SEQ ID NO: 2246 - RNA, 19 nt, Artificial Sequence
  Description of Artificial Sequence: Synthetic oligonucleotide
acaugaccccagcccucua

SEQ ID NO: 2247 - RNA, 19 nt, Artificial Sequence
  Description of Artificial Sequence: Synthetic oligonucleotide
acagcgguacagugaggac

SEQ ID NO: 2248 - RNA, 19 nt, Artificial Sequence
  Description of Artificial Sequence: Synthetic oligonucleotide
ccccacaguaccccugccc

SEQ ID NO: 2249 - RNA, 19 nt, Artificial Sequence
  Description of Artificial Sequence: Synthetic oligonucleotide
cucugagacugauggcuac

SEQ ID NO: 2250 - RNA, 19 nt, Artificial Sequence
  Description of Artificial Sequence: Synthetic oligonucleotide
cguugccccccugaccugc

SEQ ID NO: 2251 - RNA, 19 nt, Artificial Sequence
  Description of Artificial Sequence: Synthetic oligonucleotide
cagcccccagccugaauau

SEQ ID NO: 2252 - RNA, 19 nt, Artificial Sequence
  Description of Artificial Sequence: Synthetic oligonucleotide
ugugaaccagccagauguu

SEQ ID NO: 2253 - RNA, 19 nt, Artificial Sequence
  Description of Artificial Sequence: Synthetic oligonucleotide
ucggccccagcccccuucg

SEQ ID NO: 2254 - RNA, 19 nt, Artificial Sequence
  Description of Artificial Sequence: Synthetic oligonucleotide
gccccgagagggcccucug

SEQ ID NO: 2255 - RNA, 19 nt, Artificial Sequence
  Description of Artificial Sequence: Synthetic oligonucleotide
gccugcugcccgaccugcu

SEQ ID NO: 2256 - RNA, 19 nt, Artificial Sequence
  Description of Artificial Sequence: Synthetic oligonucleotide
uggugccacucuggaaagg

SEQ ID NO: 2257 - RNA, 19 nt, Artificial Sequence
  Description of Artificial Sequence: Synthetic oligonucleotide
gcccaagacucucucccca

SEQ ID NO: 2258 - RNA, 19 nt, Artificial Sequence
  Description of Artificial Sequence: Synthetic oligonucleotide
agggaagaauggggucguc

SEQ ID NO: 2259 - RNA, 19 nt, Artificial Sequence
  Description of Artificial Sequence: Synthetic oligonucleotide
caaagacguuuuugccuuu

SEQ ID NO: 2260 - RNA, 19 nt, Artificial Sequence
  Description of Artificial Sequence: Synthetic oligonucleotide
ugggggugccguggagaac

SEQ ID NO: 2261 - RNA, 19 nt, Artificial Sequence
  Description of Artificial Sequence: Synthetic oligonucleotide
ccccgaguacuugacaccc

SEQ ID NO: 2262 - RNA, 19 nt, Artificial Sequence
  Description of Artificial Sequence: Synthetic oligonucleotide
ccagggaggagcugccccu

SEQ ID NO: 2263 - RNA, 19 nt, Artificial Sequence
  Description of Artificial Sequence: Synthetic oligonucleotide
ucagccccacccuccuccu

SEQ ID NO: 2264 - RNA, 19 nt, Artificial Sequence
  Description of Artificial Sequence: Synthetic oligonucleotide
ugccuucagcccagccuuc

SEQ ID NO: 2265 - RNA, 19 nt, Artificial Sequence
  Description of Artificial Sequence: Synthetic oligonucleotide
cgacaaccucuauuacugg

SEQ ID NO: 2266 - RNA, 19 nt, Artificial Sequence
  Description of Artificial Sequence: Synthetic oligonucleotide
ggaccaggacccaccagag

SEQ ID NO: 2267 - RNA, 19 nt, Artificial Sequence
  Description of Artificial Sequence: Synthetic oligonucleotide
gcggggggcuccacccagc

SEQ ID NO: 2268 - RNA, 19 nt, Artificial Sequence
  Description of Artificial Sequence: Synthetic oligonucleotide
caccuucaaagggacaccu

SEQ ID NO: 2269 - RNA, 19 nt, Artificial Sequence
  Description of Artificial Sequence: Synthetic oligonucleotide
uacggcagagaacccagag

SEQ ID NO: 2270 - RNA, 19 nt, Artificial Sequence
  Description of Artificial Sequence: Synthetic oligonucleotide
guaccugggucuggacgug

SEQ ID NO: 2271 - RNA, 19 nt, Artificial Sequence
  Description of Artificial Sequence: Synthetic oligonucleotide
gccagugugaaccagaagg

SEQ ID NO: 2272 - RNA, 19 nt, Artificial Sequence
  Description of Artificial Sequence: Synthetic oligonucleotide
gccaaguccgcagaagccc

SEQ ID NO: 2273 - RNA, 19 nt, Artificial Sequence
  Description of Artificial Sequence: Synthetic oligonucleotide
cugauguguccucagggag

SEQ ID NO: 2274 - RNA, 19 nt, Artificial Sequence
  Description of Artificial Sequence: Synthetic oligonucleotide
gcagggaaggccugacuuc

SEQ ID NO: 2275 - RNA, 19 nt, Artificial Sequence
  Description of Artificial Sequence: Synthetic oligonucleotide
cugcuggcaucaagaggug

SEQ ID NO: 2276 - RNA, 19 nt, Artificial Sequence
  Description of Artificial Sequence: Synthetic oligonucleotide
gggagggcccuccgaccac

SEQ ID NO: 2277 - RNA, 19 nt, Artificial Sequence
  Description of Artificial Sequence: Synthetic oligonucleotide
cuuccaggggaaccugcca

SEQ ID NO: 2278 - RNA, 19 nt, Artificial Sequence
  Description of Artificial Sequence: Synthetic oligonucleotide
augccaggaaccuguccua

SEQ ID NO: 2279 - RNA, 19 nt, Artificial Sequence
  Description of Artificial Sequence: Synthetic oligonucleotide
aaggaaccuuccuuccugc

SEQ ID NO: 2280 - RNA, 19 nt, Artificial Sequence
  Description of Artificial Sequence: Synthetic oligonucleotide
cuugaguucccagauggcu

SEQ ID NO: 2281 - RNA, 19 nt, Artificial Sequence
  Description of Artificial Sequence: Synthetic oligonucleotide
uggaagggguccagccucg

SEQ ID NO: 2282 - RNA, 19 nt, Artificial Sequence
  Description of Artificial Sequence: Synthetic oligonucleotide
guuggaagaggaacagcac

SEQ ID NO: 2283 - RNA, 19 nt, Artificial Sequence
  Description of Artificial Sequence: Synthetic oligonucleotide
cuggggagucuuuguggau

SEQ ID NO: 2284 - RNA, 19 nt, Artificial Sequence
  Description of Artificial Sequence: Synthetic oligonucleotide
uucugaggcccugcccaau

SEQ ID NO: 2285 - RNA, 19 nt, Artificial Sequence
  Description of Artificial Sequence: Synthetic oligonucleotide
ugagacucuaggguccagu

SEQ ID NO: 2286 - RNA, 19 nt, Artificial Sequence
  Description of Artificial Sequence: Synthetic oligonucleotide
uggaugccacagcccagcu

SEQ ID NO: 2287 - RNA, 19 nt, Artificial Sequence
  Description of Artificial Sequence: Synthetic oligonucleotide
uuggcccuuuccuuccaga

SEQ ID NO: 2288 - RNA, 19 nt, Artificial Sequence
  Description of Artificial Sequence: Synthetic oligonucleotide
auccuggguacugaaagcc

SEQ ID NO: 2289 - RNA, 19 nt, Artificial Sequence
  Description of Artificial Sequence: Synthetic oligonucleotide
cuuagggaagcuggccuga

SEQ ID NO: 2290 - RNA, 19 nt, Artificial Sequence
  Description of Artificial Sequence: Synthetic oligonucleotide
agaggggaagcggcccuaa

SEQ ID NO: 2291 - RNA, 19 nt, Artificial Sequence
  Description of Artificial Sequence: Synthetic oligonucleotide
agggagugucuaagaacaa

SEQ ID NO: 2292 - RNA, 19 nt, Artificial Sequence
  Description of Artificial Sequence: Synthetic oligonucleotide
aaagcgacccauucagaga

SEQ ID NO: 2293 - RNA, 19 nt, Artificial Sequence
  Description of Artificial Sequence: Synthetic oligonucleotide
acugucccugaaaccuagu

SEQ ID NO: 2294 - RNA, 19 nt, Artificial Sequence
  Description of Artificial Sequence: Synthetic oligonucleotide
uacugccccccaugaggaa

SEQ ID NO: 2295 - RNA, 19 nt, Artificial Sequence
  Description of Artificial Sequence: Synthetic oligonucleotide
aggaacagcaaugguguca

SEQ ID NO: 2296 - RNA, 19 nt, Artificial Sequence
  Description of Artificial Sequence: Synthetic oligonucleotide
aguauccaggcuuuguaca

SEQ ID NO: 2297 - RNA, 19 nt, Artificial Sequence
  Description of Artificial Sequence: Synthetic oligonucleotide
agagugcuuuucuguuuag

SEQ ID NO: 2298 - RNA, 19 nt, Artificial Sequence
  Description of Artificial Sequence: Synthetic oligonucleotide
guuuuuacuuuuuuuguuu

SEQ ID NO: 2299 - RNA, 19 nt, Artificial Sequence
  Description of Artificial Sequence: Synthetic oligonucleotide
uuguuuuuuuaaagaugaa

SEQ ID NO: 2300 - RNA, 19 nt, Artificial Sequence
  Description of Artificial Sequence: Synthetic oligonucleotide
aauaaagacccagggggag

SEQ ID NO: 2301 - RNA, 19 nt, Artificial Sequence
  Description of Artificial Sequence: Synthetic oligonucleotide
gaauggguguuguaugggg

SEQ ID NO: 2302 - RNA, 19 nt, Artificial Sequence
  Description of Artificial Sequence: Synthetic oligonucleotide
gaggcaagugugggggguc

SEQ ID NO: 2303 - RNA, 19 nt, Artificial Sequence
  Description of Artificial Sequence: Synthetic oligonucleotide
ccuucuccacacccacuuu

SEQ ID NO: 2304 - RNA, 19 nt, Artificial Sequence
  Description of Artificial Sequence: Synthetic oligonucleotide
uguccauuugcaaauauau

SEQ ID NO: 2305 - RNA, 25 nt, Artificial Sequence
  Description of Artificial Sequence: Synthetic oligonucleotide
guucccggauuuuugugggcgccug

SEQ ID NO: 2306 - RNA, 25 nt, Artificial Sequence
  Description of Artificial Sequence: Synthetic oligonucleotide
gccccgccccucgucccccugcugu

SEQ ID NO: 2307 - RNA, 25 nt, Artificial Sequence
  Description of Artificial Sequence: Synthetic oligonucleotide
uguccauauaucgaggcgauagggu

SEQ ID NO: 2308 - RNA, 25 nt, Artificial Sequence
  Description of Artificial Sequence: Synthetic oligonucleotide
uuaagggaaggcggacgccugaugg

SEQ ID NO: 2309 - RNA, 25 nt, Artificial Sequence
  Description of Artificial Sequence: Synthetic oligonucleotide
gguuaaugagcaaacugaaguguuu

SEQ ID NO: 2310 - RNA, 25 nt, Artificial Sequence
  Description of Artificial Sequence: Synthetic oligonucleotide
uuccaugaucuuuuuugagucgcaa

SEQ ID NO: 2311 - RNA, 25 nt, Artificial Sequence
  Description of Artificial Sequence: Synthetic oligonucleotide
auugaaguaccaccucccgagggug

SEQ ID NO: 2312 - RNA, 25 nt, Artificial Sequence
  Description of Artificial Sequence: Synthetic oligonucleotide
gauugcuuccccaugcgggguagaa

SEQ ID NO: 2313 - RNA, 25 nt, Artificial Sequence
  Description of Artificial Sequence: Synthetic oligonucleotide
accuuugcuguccuguucaccacuc

SEQ ID NO: 2314 - RNA, 25 nt, Artificial Sequence
  Description of Artificial Sequence: Synthetic oligonucleotide
cuaccuccagcacagaauuuggcuu

SEQ ID NO: 2315 - RNA, 25 nt, Artificial Sequence
  Description of Artificial Sequence: Synthetic oligonucleotide
uaugccuacucaaugugaagaugau

SEQ ID NO: 2316 - RNA, 25 nt, Artificial Sequence
  Description of Artificial Sequence: Synthetic oligonucleotide
ugaggaugaaaaccuuugugaugau

SEQ ID NO: 2317 - RNA, 25 nt, Artificial Sequence
  Description of Artificial Sequence: Synthetic oligonucleotide
uccacuuccacuuaaugaauggugg

SEQ ID NO: 2318 - RNA, 25 nt, Artificial Sequence
  Description of Artificial Sequence: Synthetic oligonucleotide
gcaaagcaaagcuauauucaagacc

SEQ ID NO: 2319 - RNA, 25 nt, Artificial Sequence
  Description of Artificial Sequence: Synthetic oligonucleotide
cacaugcaaagcuacucccugagca

SEQ ID NO: 2320 - RNA, 25 nt, Artificial Sequence
  Description of Artificial Sequence: Synthetic oligonucleotide
aaagagucacagauaaaacgggggc

SEQ ID NO: 2321 - RNA, 25 nt, Artificial Sequence
  Description of Artificial Sequence: Synthetic oligonucleotide
caccaguagaauggccaggacaaac

SEQ ID NO: 2322 - RNA, 25 nt, Artificial Sequence
  Description of Artificial Sequence: Synthetic oligonucleotide
cgcagugcagcacagagacucagac

SEQ ID NO: 2323 - RNA, 25 nt, Artificial Sequence
  Description of Artificial Sequence: Synthetic oligonucleotide
cccuggcagccaugccugcgcaggc

SEQ ID NO: 2324 - RNA, 25 nt, Artificial Sequence
  Description of Artificial Sequence: Synthetic oligonucleotide
cagugaugagagugacauguacugu

SEQ ID NO: 2325 - RNA, 25 nt, Artificial Sequence
  Description of Artificial Sequence: Synthetic oligonucleotide
uuguggacaugcacaaaagugagug

SEQ ID NO: 2326 - RNA, 25 nt, Artificial Sequence
  Description of Artificial Sequence: Synthetic oligonucleotide
gugcaccggcacagacaugaagcug

SEQ ID NO: 2327 - RNA, 25 nt, Artificial Sequence
  Description of Artificial Sequence: Synthetic oligonucleotide
gcggcucccugccagucccgagacc

SEQ ID NO: 2328 - RNA, 25 nt, Artificial Sequence
  Description of Artificial Sequence: Synthetic oligonucleotide
ccaccuggacaugcuccgccaccuc

SEQ ID NO: 2329 - RNA, 25 nt, Artificial Sequence
  Description of Artificial Sequence: Synthetic oligonucleotide
cuaccagggcugccagguggugcag

SEQ ID NO: 2330 - RNA, 25 nt, Artificial Sequence
  Description of Artificial Sequence: Synthetic oligonucleotide
gggaaaccuggaacucaccuaccug

SEQ ID NO: 2331 - RNA, 25 nt, Artificial Sequence
  Description of Artificial Sequence: Synthetic oligonucleotide
gcccaccaaugccagccuguccuuc

SEQ ID NO: 2332 - RNA, 25 nt, Artificial Sequence
  Description of Artificial Sequence: Synthetic oligonucleotide
ccugcaggauauccaggaggugcag

SEQ ID NO: 2333 - RNA, 25 nt, Artificial Sequence
  Description of Artificial Sequence: Synthetic oligonucleotide
gggcuacgugcucaucgcucacaac

SEQ ID NO: 2334 - RNA, 25 nt, Artificial Sequence
  Description of Artificial Sequence: Synthetic oligonucleotide
ccaagugaggcaggucccacugcag

SEQ ID NO: 2335 - RNA, 25 nt, Artificial Sequence
  Description of Artificial Sequence: Synthetic oligonucleotide
gaggcugcggauugugcgaggcacc

SEQ ID NO: 2336 - RNA, 25 nt, Artificial Sequence
  Description of Artificial Sequence: Synthetic oligonucleotide
ccagcucuuugaggacaacuaugcc

SEQ ID NO: 2337 - RNA, 25 nt, Artificial Sequence
  Description of Artificial Sequence: Synthetic oligonucleotide
ccuggccgugcuagacaauggagac

SEQ ID NO: 2338 - RNA, 25 nt, Artificial Sequence
  Description of Artificial Sequence: Synthetic oligonucleotide
cccgcugaacaauaccaccccuguc

SEQ ID NO: 2339 - RNA, 25 nt, Artificial Sequence
  Description of Artificial Sequence: Synthetic oligonucleotide
cacaggggccuccccaggaggccug

SEQ ID NO: 2340 - RNA, 25 nt, Artificial Sequence
  Description of Artificial Sequence: Synthetic oligonucleotide
gcgggagcugcagcuucgaagccuc

SEQ ID NO: 2341 - RNA, 25 nt, Artificial Sequence
  Description of Artificial Sequence: Synthetic oligonucleotide
cacagagaucuugaaaggagggguc

SEQ ID NO: 2342 - RNA, 25 nt, Artificial Sequence
  Description of Artificial Sequence: Synthetic oligonucleotide
cuugauccagcggaacccccagcuc

SEQ ID NO: 2343 - RNA, 25 nt, Artificial Sequence
  Description of Artificial Sequence: Synthetic oligonucleotide
cugcuaccaggacacgauuuugugg

SEQ ID NO: 2344 - RNA, 25 nt, Artificial Sequence
  Description of Artificial Sequence: Synthetic oligonucleotide
gaaggacaucuuccacaagaacaac

SEQ ID NO: 2345 - RNA, 25 nt, Artificial Sequence
  Description of Artificial Sequence: Synthetic oligonucleotide
ccagcuggcucucacacugauagac

SEQ ID NO: 2346 - RNA, 25 nt, Artificial Sequence
  Description of Artificial Sequence: Synthetic oligonucleotide
caccaaccgcucucgggccugccac

SEQ ID NO: 2347 - RNA, 25 nt, Artificial Sequence
  Description of Artificial Sequence: Synthetic oligonucleotide
ccccuguucuccgauguguaagggc

SEQ ID NO: 2348 - RNA, 25 nt, Artificial Sequence
  Description of Artificial Sequence: Synthetic oligonucleotide
cucccgcugcuggggagagaguucu

SEQ ID NO: 2349 - RNA, 25 nt, Artificial Sequence
  Description of Artificial Sequence: Synthetic oligonucleotide
ugaggauugucagagccugacgcgc

SEQ ID NO: 2350 - RNA, 25 nt, Artificial Sequence
  Description of Artificial Sequence: Synthetic oligonucleotide
cacugucugugccgguggcugugcc

SEQ ID NO: 2351 - RNA, 25 nt, Artificial Sequence
  Description of Artificial Sequence: Synthetic oligonucleotide
ccgcugcaaggggccacugcccacu

SEQ ID NO: 2352 - RNA, 25 nt, Artificial Sequence
  Description of Artificial Sequence: Synthetic oligonucleotide
ugacugcugccaugagcagugugcu

SEQ ID NO: 2353 - RNA, 25 nt, Artificial Sequence
  Description of Artificial Sequence: Synthetic oligonucleotide
ugccggcugcacgggccccaagcac

SEQ ID NO: 2354 - RNA, 25 nt, Artificial Sequence
  Description of Artificial Sequence: Synthetic oligonucleotide
cucugacugccuggccugccuccac

SEQ ID NO: 2355 - RNA, 25 nt, Artificial Sequence
  Description of Artificial Sequence: Synthetic oligonucleotide
cuucaaccacaguggcaucugugag

SEQ ID NO: 2356 - RNA, 25 nt, Artificial Sequence
  Description of Artificial Sequence: Synthetic oligonucleotide
gcugcacugcccagcccuggucacc

SEQ ID NO: 2357 - RNA, 25 nt, Artificial Sequence
  Description of Artificial Sequence: Synthetic oligonucleotide
cuacaacacagacacguuugagucc

SEQ ID NO: 2358 - RNA, 25 nt, Artificial Sequence
  Description of Artificial Sequence: Synthetic oligonucleotide
caugcccaaucccgagggccgguau

SEQ ID NO: 2359 - RNA, 25 nt, Artificial Sequence
  Description of Artificial Sequence: Synthetic oligonucleotide
uacauucggcgccagcugugugacu

SEQ ID NO: 2360 - RNA, 25 nt, Artificial Sequence
  Description of Artificial Sequence: Synthetic oligonucleotide
ugccugucccuacaacuaccuuucu

SEQ ID NO: 2361 - RNA, 25 nt, Artificial Sequence
  Description of Artificial Sequence: Synthetic oligonucleotide
uacggacgugggauccugcacccuc

SEQ ID NO: 2362 - RNA, 25 nt, Artificial Sequence
  Description of Artificial Sequence: Synthetic oligonucleotide
cgucugcccccugcacaaccaagag

SEQ ID NO: 2363 - RNA, 25 nt, Artificial Sequence
  Description of Artificial Sequence: Synthetic oligonucleotide
ggugacagcagaggauggaacacag

SEQ ID NO: 2364 - RNA, 25 nt, Artificial Sequence
  Description of Artificial Sequence: Synthetic oligonucleotide
gcggugugagaagugcagcaagccc

SEQ ID NO: 2365 - RNA, 25 nt, Artificial Sequence
  Description of Artificial Sequence: Synthetic oligonucleotide
cugugcccgagugugcuauggucug

SEQ ID NO: 2366 - RNA, 25 nt, Artificial Sequence
  Description of Artificial Sequence: Synthetic oligonucleotide
gggcauggagcacuugcgagaggug

SEQ ID NO: 2367 - RNA, 25 nt, Artificial Sequence
  Description of Artificial Sequence: Synthetic oligonucleotide
gagggcaguuaccagugccaauauc

SEQ ID NO: 2368 - RNA, 25 nt, Artificial Sequence
  Description of Artificial Sequence: Synthetic oligonucleotide
ccaggaguuugcuggcugcaagaag

SEQ ID NO: 2369 - RNA, 25 nt, Artificial Sequence
  Description of Artificial Sequence: Synthetic oligonucleotide
gaucuuugggagccuggcauuucug

SEQ ID NO: 2370 - RNA, 25 nt, Artificial Sequence
  Description of Artificial Sequence: Synthetic oligonucleotide
gccggagagcuuugauggggaccca

SEQ ID NO: 2371 - RNA, 25 nt, Artificial Sequence
  Description of Artificial Sequence: Synthetic oligonucleotide
agccuccaacacugccccgcuccag

SEQ ID NO: 2372 - RNA, 25 nt, Artificial Sequence
  Description of Artificial Sequence: Synthetic oligonucleotide
gccagagcagcuccaaguguuugag

SEQ ID NO: 2373 - RNA, 25 nt, Artificial Sequence
  Description of Artificial Sequence: Synthetic oligonucleotide
gacucuggaagagaucacagguuac

SEQ ID NO: 2374 - RNA, 25 nt, Artificial Sequence
  Description of Artificial Sequence: Synthetic oligonucleotide
ccuauacaucucagcauggccggac

SEQ ID NO: 2375 - RNA, 25 nt, Artificial Sequence
  Description of Artificial Sequence: Synthetic oligonucleotide
cagccugccugaccucagcgucuuc

SEQ ID NO: 2376 - RNA, 25 nt, Artificial Sequence
  Description of Artificial Sequence: Synthetic oligonucleotide
ccagaaccugcaaguaauccgggga

SEQ ID NO: 2377 - RNA, 25 nt, Artificial Sequence
  Description of Artificial Sequence: Synthetic oligonucleotide
acgaauucugcacaauggcgccuac

SEQ ID NO: 2378 - RNA, 25 nt, Artificial Sequence
  Description of Artificial Sequence: Synthetic oligonucleotide
cucgcugacccugcaagggcugggc

SEQ ID NO: 2379 - RNA, 25 nt, Artificial Sequence
  Description of Artificial Sequence: Synthetic oligonucleotide
caucagcuggcuggggcugcgcuca

SEQ ID NO: 2380 - RNA, 25 nt, Artificial Sequence
  Description of Artificial Sequence: Synthetic oligonucleotide
acugagggaacugggcaguggacug

SEQ ID NO: 2381 - RNA, 25 nt, Artificial Sequence
  Description of Artificial Sequence: Synthetic oligonucleotide
ggcccucauccaccauaacacccac

SEQ ID NO: 2382 - RNA, 25 nt, Artificial Sequence
  Description of Artificial Sequence: Synthetic oligonucleotide
ccucugcuucgugcacacggugccc

SEQ ID NO: 2383 - RNA, 25 nt, Artificial Sequence
  Description of Artificial Sequence: Synthetic oligonucleotide
cugggaccagcucuuucggaacccg

SEQ ID NO: 2384 - RNA, 25 nt, Artificial Sequence
  Description of Artificial Sequence: Synthetic oligonucleotide
gcaccaagcucugcuccacacugcc

SEQ ID NO: 2385 - RNA, 25 nt, Artificial Sequence
  Description of Artificial Sequence: Synthetic oligonucleotide
caaccggccagaggacgagugugug

SEQ ID NO: 2386 - RNA, 25 nt, Artificial Sequence
  Description of Artificial Sequence: Synthetic oligonucleotide
gggcgagggccuggccugccaccag

SEQ ID NO: 2387 - RNA, 25 nt, Artificial Sequence
  Description of Artificial Sequence: Synthetic oligonucleotide
gcugugcgcccgagggcacugcugg

SEQ ID NO: 2388 - RNA, 25 nt, Artificial Sequence
  Description of Artificial Sequence: Synthetic oligonucleotide
ggguccagggcccacccaguguguc

SEQ ID NO: 2389 - RNA, 25 nt, Artificial Sequence
  Description of Artificial Sequence: Synthetic oligonucleotide
caacugcagccaguuccuucggggc

SEQ ID NO: 2390 - RNA, 25 nt, Artificial Sequence
  Description of Artificial Sequence: Synthetic oligonucleotide
ccaggagugcguggaggaaugccga

SEQ ID NO: 2391 - RNA, 25 nt, Artificial Sequence
  Description of Artificial Sequence: Synthetic oligonucleotide
aguacugcaggggcuccccagggag

SEQ ID NO: 2392 - RNA, 25 nt, Artificial Sequence
  Description of Artificial Sequence: Synthetic oligonucleotide
guaugugaaugccaggcacuguuug

SEQ ID NO: 2393 - RNA, 25 nt, Artificial Sequence
  Description of Artificial Sequence: Synthetic oligonucleotide
gccgugccacccugagugucagccc

SEQ ID NO: 2394 - RNA, 25 nt, Artificial Sequence
  Description of Artificial Sequence: Synthetic oligonucleotide
ccagaauggcucagugaccuguuuu

SEQ ID NO: 2395 - RNA, 25 nt, Artificial Sequence
  Description of Artificial Sequence: Synthetic oligonucleotide
uggaccggaggcugaccagugugug

SEQ ID NO: 2396 - RNA, 25 nt, Artificial Sequence
  Description of Artificial Sequence: Synthetic oligonucleotide
ggccugugcccacuauaaggacccu

SEQ ID NO: 2397 - RNA, 25 nt, Artificial Sequence
  Description of Artificial Sequence: Synthetic oligonucleotide
ucccuucugcguggcccgcugcccc

SEQ ID NO: 2398 - RNA, 25 nt, Artificial Sequence
  Description of Artificial Sequence: Synthetic oligonucleotide
cagcggugugaaaccugaccucucc

SEQ ID NO: 2399 - RNA, 25 nt, Artificial Sequence
  Description of Artificial Sequence: Synthetic oligonucleotide
cuacaugcccaucuggaaguuucca

SEQ ID NO: 2400 - RNA, 25 nt, Artificial Sequence
  Description of Artificial Sequence: Synthetic oligonucleotide
agaugaggagggcgcaugccagccu

SEQ ID NO: 2401 - RNA, 25 nt, Artificial Sequence
  Description of Artificial Sequence: Synthetic oligonucleotide
uugccccaucaacugcacccacucc

SEQ ID NO: 2402 - RNA, 25 nt, Artificial Sequence
  Description of Artificial Sequence: Synthetic oligonucleotide
cuguguggaccuggaugacaagggc

SEQ ID NO: 2403 - RNA, 25 nt, Artificial Sequence
  Description of Artificial Sequence: Synthetic oligonucleotide
cugccccgccgagcagagagccagc

SEQ ID NO: 2404 - RNA, 25 nt, Artificial Sequence
  Description of Artificial Sequence: Synthetic oligonucleotide
cccucugacguccaucaucucugcg

SEQ ID NO: 2405 - RNA, 25 nt, Artificial Sequence
  Description of Artificial Sequence: Synthetic oligonucleotide
ggugguuggcauucugcuggucgug

SEQ ID NO: 2406 - RNA, 25 nt, Artificial Sequence
  Description of Artificial Sequence: Synthetic oligonucleotide
ggucuuggggguggucuuugggauc

SEQ ID NO: 2407 - RNA, 25 nt, Artificial Sequence
  Description of Artificial Sequence: Synthetic oligonucleotide
ccucaucaagcgacggcagcagaag

SEQ ID NO: 2408 - RNA, 25 nt, Artificial Sequence
  Description of Artificial Sequence: Synthetic oligonucleotide
gauccggaaguacacgaugcggaga

SEQ ID NO: 2409 - RNA, 25 nt, Artificial Sequence
  Description of Artificial Sequence: Synthetic oligonucleotide
acugcugcaggaaacggagcuggug

SEQ ID NO: 2410 - RNA, 25 nt, Artificial Sequence
  Description of Artificial Sequence: Synthetic oligonucleotide
ggagccgcugacaccuagcggagcg

SEQ ID NO: 2411 - RNA, 25 nt, Artificial Sequence
  Description of Artificial Sequence: Synthetic oligonucleotide
gaugcccaaccaggcgcagaugcgg

SEQ ID NO: 2412 - RNA, 25 nt, Artificial Sequence
  Description of Artificial Sequence: Synthetic oligonucleotide
gauccugaaagagacggagcugagg

SEQ ID NO: 2413 - RNA, 25 nt, Artificial Sequence
  Description of Artificial Sequence: Synthetic oligonucleotide
gaaggugaaggugcuuggaucuggc

SEQ ID NO: 2414 - RNA, 25 nt, Artificial Sequence
  Description of Artificial Sequence: Synthetic oligonucleotide
cgcuuuuggcacagucuacaagggc

SEQ ID NO: 2415 - RNA, 25 nt, Artificial Sequence
  Description of Artificial Sequence: Synthetic oligonucleotide
caucuggaucccugauggggagaau

SEQ ID NO: 2416 - RNA, 25 nt, Artificial Sequence
  Description of Artificial Sequence: Synthetic oligonucleotide
ugugaaaauuccaguggccaucaaa

SEQ ID NO: 2417 - RNA, 25 nt, Artificial Sequence
  Description of Artificial Sequence: Synthetic oligonucleotide
aguguugagggaaaacacauccccc

SEQ ID NO: 2418 - RNA, 25 nt, Artificial Sequence
  Description of Artificial Sequence: Synthetic oligonucleotide
caaagccaacaaagaaaucuuagac

SEQ ID NO: 2419 - RNA, 25 nt, Artificial Sequence
  Description of Artificial Sequence: Synthetic oligonucleotide
cgaagcauacgugauggcuggugug

SEQ ID NO: 2420 - RNA, 25 nt, Artificial Sequence
  Description of Artificial Sequence: Synthetic oligonucleotide
gggcuccccauaugucucccgccuu

SEQ ID NO: 2421 - RNA, 25 nt, Artificial Sequence
  Description of Artificial Sequence: Synthetic oligonucleotide
ucugggcaucugccugacauccacg

SEQ ID NO: 2422 - RNA, 25 nt, Artificial Sequence
  Description of Artificial Sequence: Synthetic oligonucleotide
ggugcagcuggugacacagcuuaug

SEQ ID NO: 2423 - RNA, 25 nt, Artificial Sequence
  Description of Artificial Sequence: Synthetic oligonucleotide
gcccuauggcugccucuuagaccau

SEQ ID NO: 2424 - RNA, 25 nt, Artificial Sequence
  Description of Artificial Sequence: Synthetic oligonucleotide
uguccgggaaaaccgcggacgccug

SEQ ID NO: 2425 - RNA, 25 nt, Artificial Sequence
  Description of Artificial Sequence: Synthetic oligonucleotide
gggcucccaggaccugcugaacugg

SEQ ID NO: 2426 - RNA, 25 nt, Artificial Sequence
  Description of Artificial Sequence: Synthetic oligonucleotide
guguaugcagauugccaaggggaug

SEQ ID NO: 2427 - RNA, 25 nt, Artificial Sequence
  Description of Artificial Sequence: Synthetic oligonucleotide
gagcuaccuggaggaugugcggcuc

SEQ ID NO: 2428 - RNA, 25 nt, Artificial Sequence
  Description of Artificial Sequence: Synthetic oligonucleotide
cguacacagggacuuggccgcucgg

SEQ ID NO: 2429 - RNA, 25 nt, Artificial Sequence
  Description of Artificial Sequence: Synthetic oligonucleotide
gaacgugcuggucaagagucccaac

SEQ ID NO: 2430 - RNA, 25 nt, Artificial Sequence
  Description of Artificial Sequence: Synthetic oligonucleotide
ccaugucaaaauuacagacuucggg

SEQ ID NO: 2431 - RNA, 25 nt, Artificial Sequence
  Description of Artificial Sequence: Synthetic oligonucleotide
gcuggcucggcugcuggacauugac

SEQ ID NO: 2432 - RNA, 25 nt, Artificial Sequence
  Description of Artificial Sequence: Synthetic oligonucleotide
cgagacagaguaccaugcagauggg

SEQ ID NO: 2433 - RNA, 25 nt, Artificial Sequence
  Description of Artificial Sequence: Synthetic oligonucleotide
gggcaaggugcccaucaaguggaug

SEQ ID NO: 2434 - RNA, 25 nt, Artificial Sequence
  Description of Artificial Sequence: Synthetic oligonucleotide
ggcgcuggaguccauucuccgccgg

SEQ ID NO: 2435 - RNA, 25 nt, Artificial Sequence
  Description of Artificial Sequence: Synthetic oligonucleotide
gcgguucacccaccagagugaugug

SEQ ID NO: 2436 - RNA, 25 nt, Artificial Sequence
  Description of Artificial Sequence: Synthetic oligonucleotide
guggaguuauggugugacugugugg

SEQ ID NO: 2437 - RNA, 25 nt, Artificial Sequence
  Description of Artificial Sequence: Synthetic oligonucleotide
ggagcugaugacuuuuggggccaaa

SEQ ID NO: 2438 - RNA, 25 nt, Artificial Sequence
  Description of Artificial Sequence: Synthetic oligonucleotide
accuuacgaugggaucccagcccgg

SEQ ID NO: 2439 - RNA, 25 nt, Artificial Sequence
  Description of Artificial Sequence: Synthetic oligonucleotide
ggagaucccugaccugcuggaaaag

SEQ ID NO: 2440 - RNA, 25 nt, Artificial Sequence
  Description of Artificial Sequence: Synthetic oligonucleotide
gggggagcggcugccccagcccccc

SEQ ID NO: 2441 - RNA, 25 nt, Artificial Sequence
  Description of Artificial Sequence: Synthetic oligonucleotide
caucugcaccauugaugucuacaug

SEQ ID NO: 2442 - RNA, 25 nt, Artificial Sequence
  Description of Artificial Sequence: Synthetic oligonucleotide
gaucauggucaaauguuggaugauu

SEQ ID NO: 2443 - RNA, 25 nt, Artificial Sequence
  Description of Artificial Sequence: Synthetic oligonucleotide
ugacucugaaugucggccaagauuc

SEQ ID NO: 2444 - RNA, 25 nt, Artificial Sequence
  Description of Artificial Sequence: Synthetic oligonucleotide
ccgggaguuggugucugaauucucc

SEQ ID NO: 2445 - RNA, 25 nt, Artificial Sequence
  Description of Artificial Sequence: Synthetic oligonucleotide
ccgcauggccagggacccccagcgc

SEQ ID NO: 2446 - RNA, 25 nt, Artificial Sequence
  Description of Artificial Sequence: Synthetic oligonucleotide
cuuuguggucauccagaaugaggac

SEQ ID NO: 2447 - RNA, 25 nt, Artificial Sequence
  Description of Artificial Sequence: Synthetic oligonucleotide
cuugggcccagccagucccuuggac

SEQ ID NO: 2448 - RNA, 25 nt, Artificial Sequence
  Description of Artificial Sequence: Synthetic oligonucleotide
cagcaccuucuaccgcucacugcug

SEQ ID NO: 2449 - RNA, 25 nt, Artificial Sequence
  Description of Artificial Sequence: Synthetic oligonucleotide
ggaggacgaugacaugggggaccug

SEQ ID NO: 2450 - RNA, 25 nt, Artificial Sequence
  Description of Artificial Sequence: Synthetic oligonucleotide
gguggaugcugaggaguaucuggua

SEQ ID NO: 2451 - RNA, 25 nt, Artificial Sequence
  Description of Artificial Sequence: Synthetic oligonucleotide
accccagcagggcuucuucugucca

SEQ ID NO: 2452 - RNA, 25 nt, Artificial Sequence
  Description of Artificial Sequence: Synthetic oligonucleotide
agacccugccccgggcgcugggggc

SEQ ID NO: 2453 - RNA, 25 nt, Artificial Sequence
  Description of Artificial Sequence: Synthetic oligonucleotide
caugguccaccacaggcaccgcagc

SEQ ID NO: 2454 - RNA, 25 nt, Artificial Sequence
  Description of Artificial Sequence: Synthetic oligonucleotide
cucaucuaccaggaguggcgguggg

SEQ ID NO: 2455 - RNA, 25 nt, Artificial Sequence
  Description of Artificial Sequence: Synthetic oligonucleotide
ggaccugacacuagggcuggagccc

SEQ ID NO: 2456 - RNA, 25 nt, Artificial Sequence
  Description of Artificial Sequence: Synthetic oligonucleotide
cucugaagaggaggcccccaggucu

SEQ ID NO: 2457 - RNA, 25 nt, Artificial Sequence
  Description of Artificial Sequence: Synthetic oligonucleotide
uccacuggcacccuccgaaggggcu

SEQ ID NO: 2458 - RNA, 25 nt, Artificial Sequence
  Description of Artificial Sequence: Synthetic oligonucleotide
uggcuccgauguauuugauggugac

SEQ ID NO: 2459 - RNA, 25 nt, Artificial Sequence
  Description of Artificial Sequence: Synthetic oligonucleotide
ccugggaaugggggcagccaagggg

SEQ ID NO: 2460 - RNA, 25 nt, Artificial Sequence
  Description of Artificial Sequence: Synthetic oligonucleotide
gcugcaaagccuccccacacaugac

SEQ ID NO: 2461 - RNA, 25 nt, Artificial Sequence
  Description of Artificial Sequence: Synthetic oligonucleotide
ccccagcccucuacagcgguacagu

SEQ ID NO: 2462 - RNA, 25 nt, Artificial Sequence
  Description of Artificial Sequence: Synthetic oligonucleotide
ugaggaccccacaguaccccugccc

SEQ ID NO: 2463 - RNA, 25 nt, Artificial Sequence
  Description of Artificial Sequence: Synthetic oligonucleotide
cucugagacugauggcuacguugcc

SEQ ID NO: 2464 - RNA, 25 nt, Artificial Sequence
  Description of Artificial Sequence: Synthetic oligonucleotide
cccccugaccugcagcccccagccu

SEQ ID NO: 2465 - RNA, 25 nt, Artificial Sequence
  Description of Artificial Sequence: Synthetic oligonucleotide
ugaauaugugaaccagccagauguu

SEQ ID NO: 2466 - RNA, 25 nt, Artificial Sequence
  Description of Artificial Sequence: Synthetic oligonucleotide
ucggccccagcccccuucgccccga

SEQ ID NO: 2467 - RNA, 25 nt, Artificial Sequence
  Description of Artificial Sequence: Synthetic oligonucleotide
agagggcccucugccugcugcccga

SEQ ID NO: 2468 - RNA, 25 nt, Artificial Sequence
  Description of Artificial Sequence: Synthetic oligonucleotide
accugcuggugccacucuggaaagg

SEQ ID NO: 2469 - RNA, 25 nt, Artificial Sequence
  Description of Artificial Sequence: Synthetic oligonucleotide
gcccaagacucucuccccagggaag

SEQ ID NO: 2470 - RNA, 25 nt, Artificial Sequence
  Description of Artificial Sequence: Synthetic oligonucleotide
gaauggggucgucaaagacguuuuu

SEQ ID NO: 2471 - RNA, 25 nt, Artificial Sequence
  Description of Artificial Sequence: Synthetic oligonucleotide
ugccuuugggggugccguggagaac

SEQ ID NO: 2472 - RNA, 25 nt, Artificial Sequence
  Description of Artificial Sequence: Synthetic oligonucleotide
ccccgaguacuugacaccccaggga

SEQ ID NO: 2473 - RNA, 25 nt, Artificial Sequence
  Description of Artificial Sequence: Synthetic oligonucleotide
aggagcugccccucagccccacccu

SEQ ID NO: 2474 - RNA, 25 nt, Artificial Sequence
  Description of Artificial Sequence: Synthetic oligonucleotide
uccuccugccuucagcccagccuuc

SEQ ID NO: 2475 - RNA, 25 nt, Artificial Sequence
  Description of Artificial Sequence: Synthetic oligonucleotide
cgacaaccucuauuacugggaccag

SEQ ID NO: 2476 - RNA, 25 nt, Artificial Sequence
  Description of Artificial Sequence: Synthetic oligonucleotide
ggacccaccagagcggggggcucca

SEQ ID NO: 2477 - RNA, 25 nt, Artificial Sequence
  Description of Artificial Sequence: Synthetic oligonucleotide
acccagcaccuucaaagggacaccu

SEQ ID NO: 2478 - RNA, 25 nt, Artificial Sequence
  Description of Artificial Sequence: Synthetic oligonucleotide
uacggcagagaacccagaguaccug

SEQ ID NO: 2479 - RNA, 25 nt, Artificial Sequence
  Description of Artificial Sequence: Synthetic oligonucleotide
gggucuggacgugccagugugaacc

SEQ ID NO: 2480 - RNA, 25 nt, Artificial Sequence
  Description of Artificial Sequence: Synthetic oligonucleotide
cagaaggccaaguccgcagaagccc

SEQ ID NO: 2481 - RNA, 25 nt, Artificial Sequence
  Description of Artificial Sequence: Synthetic oligonucleotide
cugauguguccucagggagcaggga

SEQ ID NO: 2482 - RNA, 25 nt, Artificial Sequence
  Description of Artificial Sequence: Synthetic oligonucleotide
aaggccugacuucugcuggcaucaa

SEQ ID NO: 2483 - RNA, 25 nt, Artificial Sequence
  Description of Artificial Sequence: Synthetic oligonucleotide
agaggugggagggcccuccgaccac

SEQ ID NO: 2484 - RNA, 25 nt, Artificial Sequence
  Description of Artificial Sequence: Synthetic oligonucleotide
cuuccaggggaaccugccaugccag

SEQ ID NO: 2485 - RNA, 25 nt, Artificial Sequence
  Description of Artificial Sequence: Synthetic oligonucleotide
ggaaccuguccuaaggaaccuuccu

SEQ ID NO: 2486 - RNA, 25 nt, Artificial Sequence
  Description of Artificial Sequence: Synthetic oligonucleotide
uuccugcuugaguucccagauggcu

SEQ ID NO: 2487 - RNA, 25 nt, Artificial Sequence
  Description of Artificial Sequence: Synthetic oligonucleotide
uggaagggguccagccucguuggaa

SEQ ID NO: 2488 - RNA, 25 nt, Artificial Sequence
  Description of Artificial Sequence: Synthetic oligonucleotide
agaggaacagcacuggggagucuuu

SEQ ID NO: 2489 - RNA, 25 nt, Artificial Sequence
  Description of Artificial Sequence: Synthetic oligonucleotide
uguggauucugaggcccugcccaau

SEQ ID NO: 2490 - RNA, 25 nt, Artificial Sequence
  Description of Artificial Sequence: Synthetic oligonucleotide
ugagacucuaggguccaguggaugc

SEQ ID NO: 2491 - RNA, 25 nt, Artificial Sequence
  Description of Artificial Sequence: Synthetic oligonucleotide
ccacagcccagcuuggcccuuuccu

SEQ ID NO: 2492 - RNA, 25 nt, Artificial Sequence
  Description of Artificial Sequence: Synthetic oligonucleotide
uuccagauccuggguacugaaagcc

SEQ ID NO: 2493 - RNA, 25 nt, Artificial Sequence
  Description of Artificial Sequence: Synthetic oligonucleotide
cuuagggaagcuggccugagagggg

SEQ ID NO: 2494 - RNA, 25 nt, Artificial Sequence
  Description of Artificial Sequence: Synthetic oligonucleotide
gaagcggcccuaagggagugucuaa

SEQ ID NO: 2495 - RNA, 25 nt, Artificial Sequence
  Description of Artificial Sequence: Synthetic oligonucleotide
agaacaaaagcgacccauucagaga

SEQ ID NO: 2496 - RNA, 25 nt, Artificial Sequence
  Description of Artificial Sequence: Synthetic oligonucleotide
acugucccugaaaccuaguacugcc

SEQ ID NO: 2497 - RNA, 25 nt, Artificial Sequence
  Description of Artificial Sequence: Synthetic oligonucleotide
cccccaugaggaaggaacagcaaug

SEQ ID NO: 2498 - RNA, 25 nt, Artificial Sequence
  Description of Artificial Sequence: Synthetic oligonucleotide
ggugucaguauccaggcuuuguaca

SEQ ID NO: 2499 - RNA, 25 nt, Artificial Sequence
  Description of Artificial Sequence: Synthetic oligonucleotide
agagugcuuuucuguuuaguuuuua

SEQ ID NO: 2500 - RNA, 25 nt, Artificial Sequence
  Description of Artificial Sequence: Synthetic oligonucleotide
acuuuuuuuguuuuguuuuuuuaaa

SEQ ID NO: 2501 - RNA, 25 nt, Artificial Sequence
  Description of Artificial Sequence: Synthetic oligonucleotide
agaugaaauaaagacccagggggag

SEQ ID NO: 2502 - RNA, 25 nt, Artificial Sequence
  Description of Artificial Sequence: Synthetic oligonucleotide
gaauggguguuguauggggaggcaa

SEQ ID NO: 2503 - RNA, 25 nt, Artificial Sequence
  Description of Artificial Sequence: Synthetic oligonucleotide
agugugggggguccuucuccacacc

SEQ ID NO: 2504 - RNA, 25 nt, Artificial Sequence
  Description of Artificial Sequence: Synthetic oligonucleotide
ccacuuuguccauuugcaaauauau

SEQ ID NO: 2505 - RNA, 25 nt, Artificial Sequence
  Description of Artificial Sequence: Synthetic oligonucleotide
gcaaauauauuuuggaaaacagcua

SEQ ID NO: 2506 - RNA, 25 nt, Artificial Sequence
  Description of Artificial Sequence: Synthetic oligonucleotide
ggaggagguggaggaggagggcugc

SEQ ID NO: 2507 - RNA, 25 nt, Artificial Sequence
  Description of Artificial Sequence: Synthetic oligonucleotide
cuugaggaaguauaagaaugaaguu

SEQ ID NO: 2508 - RNA, 25 nt, Artificial Sequence
  Description of Artificial Sequence: Synthetic oligonucleotide
ugugaagcugagauuccccuccauu

SEQ ID NO: 2509 - RNA, 25 nt, Artificial Sequence
  Description of Artificial Sequence: Synthetic oligonucleotide
ugggaccggagaaaccaggggagcc

SEQ ID NO: 2510 - RNA, 25 nt, Artificial Sequence
  Description of Artificial Sequence: Synthetic oligonucleotide
cccccgggcagccgcgcgccccuuc

SEQ ID NO: 2511 - RNA, 25 nt, Artificial Sequence
  Description of Artificial Sequence: Synthetic oligonucleotide
cccacggggcccuuuacugcgccgc

SEQ ID NO: 2512 - RNA, 25 nt, Artificial Sequence
  Description of Artificial Sequence: Synthetic oligonucleotide
cgcgcccggcccccaccccucgcag

SEQ ID NO: 2513 - RNA, 25 nt, Artificial Sequence
  Description of Artificial Sequence: Synthetic oligonucleotide
gcaccccgcgccccgcgcccuccca

SEQ ID NO: 2514 - RNA, 25 nt, Artificial Sequence
  Description of Artificial Sequence: Synthetic oligonucleotide
agccggguccagccggagccauggg

SEQ ID NO: 2515 - RNA, 25 nt, Artificial Sequence
  Description of Artificial Sequence: Synthetic oligonucleotide
ggccggagccgcagugagcaccaug

SEQ ID NO: 2516 - RNA, 25 nt, Artificial Sequence
  Description of Artificial Sequence: Synthetic oligonucleotide
ggagcuggcggccuugugccgcugg

SEQ ID NO: 2517 - RNA, 25 nt, Artificial Sequence
  Description of Artificial Sequence: Synthetic oligonucleotide
ggggcuccuccucgcccucuugccc

SEQ ID NO: 2518 - RNA, 25 nt, Artificial Sequence
  Description of Artificial Sequence: Synthetic oligonucleotide
ccccggagccgcgagcacccaagug

SEQ ID NO: 2519 - RNA, 5511 nt, Homo sapiens
acacacacacaccccuccccugccaucccuccccggacuccggcuccggcuccgauugcaauuugcaaccuccgcugccgucgccgcagcagccaccaauucgccagcgguucagguggcucuugccucgauguccuagccuaggggcccccgggccggacuuggcugggcucccuucacccucugcggagucaugagggcgaacgacgcucugcaggugcugggcuugcuuuucagccuggcccggggcuccgaggugggcaacucucaggcaguguguccugggacucugaauggccugagugugaccggcgaugcugagaaccaauaccagacacuguacaagcucuacgagaggugugagguggugauggggaaccuugagauugugcucacgggacacaaugccgaccucuccuuccugcaguggauucgagaagugacaggcuauguccucguggccaugaaugaauucucuacucuaccauugcccaaccuccgcguggugcgagggacccaggucuacgaugggaaguuugccaucuucgucauguugaacuauaacaccaacuccagccacgcucugcgccagcuccgcuugacucagcucaccgagauucugucaggggguguuuauauugagaagaacgauaagcuuugucacauggacacaauugacuggagggacaucgugagggaccgagaugcugagauaguggugaaggacaauggcagaagcuguccccccugucaugagguuugcaaggggcgaugcugggguccuggaucagaagacugccagacauugaccaagaccaucugugcuccucaguguaauggucacugcuuugggcccaaccccaaccagugcugccaugaugagugugccgggggcugcucaggcccucaggacacagacugcuuugccugccggcacuucaaugacaguggagccuguguaccucgcuguccacagccucuugucuacaacaagcuaacuuuccagcuggaacccaauccccacaccaaguaucaguauggaggaguuuguguagccagcuguccccauaacuuugugguggaucaaacauccugugucagggccuguccuccugacaagauggaaguagauaaaaaugggcucaagaugugugagccuugugggggacuaugucccaaagccugugagggaacaggcucugggagccgcuuccagacuguggacucgagcaacauugauggauuugugaacugcaccaagauccugggcaaccuggacuuucugaucaccggccucaauggagaccccuggcacaagaucccugcccuggacccagagaagcucaaugucuuccggacaguacgggagaucacagguuaccugaacauccaguccuggccgccccacaugcacaacuucaguguuuuuuccaauuugacaaccauuggaggcagaagccucuacaaccggggcuucucauuguugaucaugaagaacuugaaugucacaucucugggcuuccgaucccugaaggaaauuagugcugggcguaucuauauaagugccaauaggcagcucugcuaccaccacucuuugaacuggaccaaggugcuucgggggccuacggaagagcgacuagacaucaagcauaaucggccgcgcagagacugcguggcagagggcaaagugugugacccacugugcuccucugggggaugcuggggcccaggcccuggucagugcuuguccugucgaaauuauagccgaggaggugucugugugacccacugcaacuuucugaauggggagccucgagaauuugcccaugaggccgaaugcuucuccugccacccggaaugccaacccauggagggcacugccacaugcaauggcucgggcucugauacuugugcucaaugugcccauuuucgagaugggccccacugugugagcagcugcccccauggaguccuaggugccaagggcccaaucuacaaguacccagauguucagaaugaaugucggcccugccaugagaacugcacccagggguguaaaggaccagagcuucaagacuguuuaggacaaacacuggugcugaucggcaaaacccaucugacaauggcuuugacagugauagcaggauugguagugauuuucaugaugcugggcggcacuuuucucuacuggcgugggcgccggauucagaauaaaagggcuaugaggcgauacuuggaacggggugagagcauagagccucuggaccccagugagaaggcuaacaaagucuuggccagaaucuucaaagagacagagcuaaggaagcuuaaagugcuuggcucgggugucuuuggaacugugcacaaaggaguguggaucccugagggugaaucaaucaagauuccagucugcauuaaagucauugaggacaagaguggacggcagaguuuucaagcugugacagaucauaugcuggccauuggcagccuggaccaugcccacauuguaaggcugcugggacuaugcccagggucaucucugcagcuugucacucaauauuugccucuggguucucugcuggaucaugugagacaacaccggggggcacuggggccacagcugcugcucaacuggggaguacaaauugccaagggaauguacuaccuugaggaacaugguauggugcauagaaaccuggcugcccgaaacgugcuacucaagucacccagucagguucagguggcagauuuugguguggcugaccugcugccuccugaugauaagcagcugcuauacagugaggccaagacuccaauuaaguggauggcccuugagaguauccacuuugggaaauacacacaccagagugaugucuggagcuauggugugacaguuugggaguugaugaccuucggggcagagcccuaugcagggcuacgauuggcugaaguaccagaccugcuagagaagggggagcgguuggcacagccccagaucugcacaauugaugucuacauggugauggucaaguguuggaugauugaugagaacauucgcccaaccuuuaaagaacuagccaaugaguucaccaggauggcccgagacccaccacgguaucuggucauaaagagagagagugggccuggaauagccccugggccagagccccauggucugacaaacaagaagcuagaggaaguagagcuggagccagaacuagaccuagaccuagacuuggaagcagaggaggacaaccuggcaaccaccacacugggcuccgcccucagccuaccaguuggaacacuuaaucggccacgugggagccagagccuuuuaaguccaucaucuggauacaugcccaugaaccaggguaaucuuggggagucuugccaggagucugcaguuucugggagcagugaacggugcccccguccagucucucuacacccaaugccacggggaugccuggcaucagagucaucagaggggcauguaacaggcucugaggcugagcuccaggagaaagugucaauguguaggagccggagcaggagccggagcccacggccacgcggagauagcgccuaccauucccagcgccacagucugcugacuccuguuaccccacucuccccacccggguuagaggaagaggaugucaacgguuaugucaugccagauacacaccucaaagguacucccuccucccgggaaggcacccuuucuucagugggucucaguucuguccuggguacugaagaagaagaugaagaugaggaguaugaauacaugaaccggaggagaaggcacaguccaccucaucccccuaggccaaguucccuugaggagcuggguuaugaguacauggauguggggucagaccucagugccucucugggcagcacacagaguugcccacuccacccuguacccaucaugcccacugcaggcacaacuccagaugaagacuaugaauauaugaaucggcaacgagauggaggugguccugggggugauuaugcagccaugggggccugcccagcaucugagcaaggguaugaagagaugagagcuuuucaggggccuggacaucaggccccccauguccauuaugcccgccuaaaaacucuacguagcuuagaggcuacagacucugccuuugauaacccugauuacuggcauagcaggcuuuuccccaaggcuaaugcccagagaacguaacuccugcucccuguggcacucagggagcauuuaauggcagcuagugccuuuagaggguaccgucuucucccuauucccucucucucccaggucccagccccuuuuccccagucccagacaauuccauucaaucuuuggaggcuuuuaaacauuuugacacaaaauucuuaugguauguagccagcugugcacuuucuucucuuucccaaccccaggaaagguuuuccuuauuuugugugcuuucccagucccauuccucagcuucuucacaggcacuccuggagauaugaaggauuacucuccauaucccuuccucucaggcucuugacuacuuggaacuaggcucuuaugugugccuuuguuucccaucagacugucaagaagaggaaagggaggaaaccuagcagaggaaaguguaauuuugguuuaugacucuuaacccccuagaaagacagaagcuuaaaaucugugaagaaagagguuaggaguagauauugauuacuaucauaauucagcacuuaacuaugagccaggcaucauacuaaacuucaccuacauuaucucacuuaguccuuuaucauccuuaaaacaauucugugacauacauauuaucucauuuuacacaaagggaagucgggcaugguggcucaugccuguaaucucagcacuuugggaggcugaggcagaaggauuaccugaggcaaggaguuugagaccagcuuagccaacauaguaagacccccaucucuuuaaaaaaaaaaaaaaaaaaaaaaaaaaaacuuuagaacugggugcaguggcucaugccuguaaucccagccagcacuuugggaggcugagaugggaagaucacuugagcccagaauuagagauaagccuauggaaacauagcaagacacugucucuacaggggaaaaaaaaaaaagaaacugagccuuaaagagaugaaauaaauuaagcaguagauccaggaugcaaaauccucccaauuccugugcaugugcucuuauuguaaggugccaagaaaaacugauuuaaguuacagcccuuguuuaaggggcacuguuucuuguuuuugcacugaaucaagucuaaccccaacagccacauccuccuauaccuagacaucucaucucaggaaguggugguggggguagucagaaggaaaaauaacuggacaucuuuguguaaaccauaauccacaugugccguaaaugaucuucacuccuuauccgagggcaaauucacaaggauccccaagauccacuuuuagaagccauucucaucca

SEQ ID NO: 2520 - RNA, 1050 nt, Homo sapiens
acacacacacaccccuccccugccaucccuccccggacuccggcuccggcuccgauugcaauuugcaaccuccgcugccgucgccgcagcagccaccaauucgccagcgguucagguggcucuugccucgauguccuagccuaggggcccccgggccggacuuggcugggcucccuucacccucugcggagucaugagggcgaacgacgcucugcaggugcugggcuugcuuuucagccuggcccggggcuccgaggugggcaacucucaggcaguguguccugggacucugaauggccugagugugaccggcgaugcugagaaccaauaccagacacuguacaagcucuacgagaggugugagguggugauggggaaccuugagauugugcucacgggacacaaugccgaccucuccuuccugcaguggauucgagaagugacaggcuauguccucguggccaugaaugaauucucuacucuaccauugcccaaccuccgcguggugcgagggacccaggucuacgaugggaaguuugccaucuucgucauguugaacuauaacaccaacuccagccacgcucugcgccagcuccgcuugacucagcucaccggucaguucccgaugguuccuucuggccucaccccucagccagcccaagacugguaccuccuugaugaugacccaagacugcucacucuaagugccucuuccaaggugccugucaccuuggccgcugucuaaagguccauugcucccuaagcaauagagggcccccaguagggggagcuaggggcaucugcuccagggaaaggaacccuguguccuuguggggcuggagucagagcuggaucuguuaaccguuuuucuaauuucaaaguacaguguaccggaggccaggccugauggcuuacaccuguaaucccagcauuuugggaggccaaggagggcagaucacuugagaucaggaguuugagaccagccuggccaacauggcgaaacccugucucuacuaaaaauacaaaaaaauaaaauaaaauaaaaaauua

SEQ ID NO: 2521 - RNA, 19 nt, Artificial Sequence
  Description of Artificial Sequence: Synthetic oligonucleotide
acacacacacaccccuccc

SEQ ID NO: 2522 - RNA, 19 nt, Artificial Sequence
  Description of Artificial Sequence: Synthetic oligonucleotide
ccugccaucccuccccgga

SEQ ID NO: 2523 - RNA, 19 nt, Artificial Sequence
  Description of Artificial Sequence: Synthetic oligonucleotide
acuccggcuccggcuccga

SEQ ID NO: 2524 - RNA, 19 nt, Artificial Sequence
  Description of Artificial Sequence: Synthetic oligonucleotide
auugcaauuugcaaccucc

SEQ ID NO: 2525 - RNA, 19 nt, Artificial Sequence
  Description of Artificial Sequence: Synthetic oligonucleotide
cgcugccgucgccgcagca

SEQ ID NO: 2526 - RNA, 19 nt, Artificial Sequence
  Description of Artificial Sequence: Synthetic oligonucleotide
agccaccaauucgccagcg

SEQ ID NO: 2527 - RNA, 19 nt, Artificial Sequence
  Description of Artificial Sequence: Synthetic oligonucleotide
gguucagguggcucuugcc

SEQ ID NO: 2528 - RNA, 19 nt, Artificial Sequence
  Description of Artificial Sequence: Synthetic oligonucleotide
cucgauguccuagccuagg

SEQ ID NO: 2529 - RNA, 19 nt, Artificial Sequence
  Description of Artificial Sequence: Synthetic oligonucleotide
gggcccccgggccggacuu

SEQ ID NO: 2530 - RNA, 19 nt, Artificial Sequence
  Description of Artificial Sequence: Synthetic oligonucleotide
uggcugggcucccuucacc

SEQ ID NO: 2531 - RNA, 19 nt, Artificial Sequence
  Description of Artificial Sequence: Synthetic oligonucleotide
ccucugcggagucaugagg

SEQ ID NO: 2532 - RNA, 19 nt, Artificial Sequence
  Description of Artificial Sequence: Synthetic oligonucleotide
ggcgaacgacgcucugcag

SEQ ID NO: 2533 - RNA, 19 nt, Artificial Sequence
  Description of Artificial Sequence: Synthetic oligonucleotide
ggugcugggcuugcuuuuc

SEQ ID NO: 2534 - RNA, 19 nt, Artificial Sequence
  Description of Artificial Sequence: Synthetic oligonucleotide
cagccuggcccggggcucc

SEQ ID NO: 2535 - RNA, 19 nt, Artificial Sequence
  Description of Artificial Sequence: Synthetic oligonucleotide
cgaggugggcaacucucag

SEQ ID NO: 2536 - RNA, 19 nt, Artificial Sequence
  Description of Artificial Sequence: Synthetic oligonucleotide
ggcaguguguccugggacu

SEQ ID NO: 2537 - RNA, 19 nt, Artificial Sequence
  Description of Artificial Sequence: Synthetic oligonucleotide
ucugaauggccugagugug

SEQ ID NO: 2538 - RNA, 19 nt, Artificial Sequence
  Description of Artificial Sequence: Synthetic oligonucleotide
gaccggcgaugcugagaac

SEQ ID NO: 2539 - RNA, 19 nt, Artificial Sequence
  Description of Artificial Sequence: Synthetic oligonucleotide
ccaauaccagacacuguac

SEQ ID NO: 2540 - RNA, 19 nt, Artificial Sequence
  Description of Artificial Sequence: Synthetic oligonucleotide
caagcucuacgagaggugu

SEQ ID NO: 2541 - RNA, 19 nt, Artificial Sequence
  Description of Artificial Sequence: Synthetic oligonucleotide
ugagguggugauggggaac

SEQ ID NO: 2542 - RNA, 19 nt, Artificial Sequence
  Description of Artificial Sequence: Synthetic oligonucleotide
ccuugagauugugcucacg

SEQ ID NO: 2543 - RNA, 19 nt, Artificial Sequence
  Description of Artificial Sequence: Synthetic oligonucleotide
gggacacaaugccgaccuc

SEQ ID NO: 2544 - RNA, 19 nt, Artificial Sequence
  Description of Artificial Sequence: Synthetic oligonucleotide
cuccuuccugcaguggauu

SEQ ID NO: 2545 - RNA, 19 nt, Artificial Sequence
  Description of Artificial Sequence: Synthetic oligonucleotide
ucgagaagugacaggcuau

SEQ ID NO: 2546 - RNA, 19 nt, Artificial Sequence
  Description of Artificial Sequence: Synthetic oligonucleotide
uguccucguggccaugaau

SEQ ID NO: 2547 - RNA, 19 nt, Artificial Sequence
  Description of Artificial Sequence: Synthetic oligonucleotide
ugaauucucuacucuacca

SEQ ID NO: 2548 - RNA, 19 nt, Artificial Sequence
  Description of Artificial Sequence: Synthetic oligonucleotide
auugcccaaccuccgcgug

SEQ ID NO: 2549 - RNA, 19 nt, Artificial Sequence
  Description of Artificial Sequence: Synthetic oligonucleotide
ggugcgagggacccagguc

SEQ ID NO: 2550 - RNA, 19 nt, Artificial Sequence
  Description of Artificial Sequence: Synthetic oligonucleotide
cuacgaugggaaguuugcc

SEQ ID NO: 2551 - RNA, 19 nt, Artificial Sequence
  Description of Artificial Sequence: Synthetic oligonucleotide
caucuucgucauguugaac

SEQ ID NO: 2552 - RNA, 19 nt, Artificial Sequence
  Description of Artificial Sequence: Synthetic oligonucleotide
cuauaacaccaacuccagc

SEQ ID NO: 2553 - RNA, 19 nt, Artificial Sequence
  Description of Artificial Sequence: Synthetic oligonucleotide
ccacgcucugcgccagcuc

SEQ ID NO: 2554 - RNA, 19 nt, Artificial Sequence
  Description of Artificial Sequence: Synthetic oligonucleotide
ccgcuugacucagcucacc

SEQ ID NO: 2555 - RNA, 19 nt, Artificial Sequence
  Description of Artificial Sequence: Synthetic oligonucleotide
cggucaguucccgaugguu

SEQ ID NO: 2556 - RNA, 19 nt, Artificial Sequence
  Description of Artificial Sequence: Synthetic oligonucleotide
uccuucuggccucaccccu

SEQ ID NO: 2557 - RNA, 19 nt, Artificial Sequence
  Description of Artificial Sequence: Synthetic oligonucleotide
ucagccagcccaagacugg

SEQ ID NO: 2558 - RNA, 19 nt, Artificial Sequence
  Description of Artificial Sequence: Synthetic oligonucleotide
guaccuccuugaugaugac

SEQ ID NO: 2559 - RNA, 19 nt, Artificial Sequence
  Description of Artificial Sequence: Synthetic oligonucleotide
cccaagacugcucacucua

SEQ ID NO: 2560 - RNA, 19 nt, Artificial Sequence
  Description of Artificial Sequence: Synthetic oligonucleotide
aagugccucuuccaaggug

SEQ ID NO: 2561 - RNA, 19 nt, Artificial Sequence
  Description of Artificial Sequence: Synthetic oligonucleotide
gccugucaccuuggccgcu

SEQ ID NO: 2562 - RNA, 19 nt, Artificial Sequence
  Description of Artificial Sequence: Synthetic oligonucleotide
ugucuaaagguccauugcu

SEQ ID NO: 2563 - RNA, 19 nt, Artificial Sequence
  Description of Artificial Sequence: Synthetic oligonucleotide
ucccuaagcaauagagggc

SEQ ID NO: 2564 - RNA, 19 nt, Artificial Sequence
  Description of Artificial Sequence: Synthetic oligonucleotide
cccccaguagggggagcua

SEQ ID NO: 2565 - RNA, 19 nt, Artificial Sequence
  Description of Artificial Sequence: Synthetic oligonucleotide
aggggcaucugcuccaggg

SEQ ID NO: 2566 - RNA, 19 nt, Artificial Sequence
  Description of Artificial Sequence: Synthetic oligonucleotide
gaaaggaacccuguguccu

SEQ ID NO: 2567 - RNA, 19 nt, Artificial Sequence
  Description of Artificial Sequence: Synthetic oligonucleotide
uuguggggcuggagucaga

SEQ ID NO: 2568 - RNA, 19 nt, Artificial Sequence
  Description of Artificial Sequence: Synthetic oligonucleotide
agcuggaucuguuaaccgu

SEQ ID NO: 2569 - RNA, 19 nt, Artificial Sequence
  Description of Artificial Sequence: Synthetic oligonucleotide
uuuuucuaauuucaaagua

SEQ ID NO: 2570 - RNA, 19 nt, Artificial Sequence
  Description of Artificial Sequence: Synthetic oligonucleotide
acaguguaccggaggccag

SEQ ID NO: 2571 - RNA, 19 nt, Artificial Sequence
  Description of Artificial Sequence: Synthetic oligonucleotide
ggccugauggcuuacaccu

SEQ ID NO: 2572 - RNA, 19 nt, Artificial Sequence
  Description of Artificial Sequence: Synthetic oligonucleotide
uguaaucccagcauuuugg

SEQ ID NO: 2573 - RNA, 19 nt, Artificial Sequence
  Description of Artificial Sequence: Synthetic oligonucleotide
ggaggccaaggagggcaga

SEQ ID NO: 2574 - RNA, 19 nt, Artificial Sequence
  Description of Artificial Sequence: Synthetic oligonucleotide
aucacuugagaucaggagu

SEQ ID NO: 2575 - RNA, 19 nt, Artificial Sequence
  Description of Artificial Sequence: Synthetic oligonucleotide
uuugagaccagccuggcca

SEQ ID NO: 2576 - RNA, 19 nt, Artificial Sequence
  Description of Artificial Sequence: Synthetic oligonucleotide
aacauggcgaaacccuguc

SEQ ID NO: 2577 - RNA, 19 nt, Artificial Sequence
  Description of Artificial Sequence: Synthetic oligonucleotide
cucuacuaaaaauacaaaa

SEQ ID NO: 2578 - RNA, 19 nt, Artificial Sequence
  Description of Artificial Sequence: Synthetic oligonucleotide
aaaauaaaauaaaauaaaa

SEQ ID NO: 2579 - RNA, 19 nt, Artificial Sequence
  Description of Artificial Sequence: Synthetic oligonucleotide
aaaauaaaauaaaaaauua

SEQ ID NO: 2580 - RNA, 19 nt, Artificial Sequence
  Description of Artificial Sequence: Synthetic oligonucleotide
cgagauucugucagggggu

SEQ ID NO: 2581 - RNA, 19 nt, Artificial Sequence
  Description of Artificial Sequence: Synthetic oligonucleotide
uguuuauauugagaagaac

SEQ ID NO: 2582 - RNA, 19 nt, Artificial Sequence
  Description of Artificial Sequence: Synthetic oligonucleotide
cgauaagcuuugucacaug

SEQ ID NO: 2583 - RNA, 19 nt, Artificial Sequence
  Description of Artificial Sequence: Synthetic oligonucleotide
ggacacaauugacuggagg

SEQ ID NO: 2584 - RNA, 19 nt, Artificial Sequence
  Description of Artificial Sequence: Synthetic oligonucleotide
ggacaucgugagggaccga

SEQ ID NO: 2585 - RNA, 19 nt, Artificial Sequence
  Description of Artificial Sequence: Synthetic oligonucleotide
agaugcugagauaguggug

SEQ ID NO: 2586 - RNA, 19 nt, Artificial Sequence
  Description of Artificial Sequence: Synthetic oligonucleotide
gaaggacaauggcagaagc

SEQ ID NO: 2587 - RNA, 19 nt, Artificial Sequence
  Description of Artificial Sequence: Synthetic oligonucleotide
cuguccccccugucaugag

SEQ ID NO: 2588 - RNA, 19 nt, Artificial Sequence
  Description of Artificial Sequence: Synthetic oligonucleotide
gguuugcaaggggcgaugc

SEQ ID NO: 2589 - RNA, 19 nt, Artificial Sequence
  Description of Artificial Sequence: Synthetic oligonucleotide
cugggguccuggaucagaa

SEQ ID NO: 2590 - RNA, 19 nt, Artificial Sequence
  Description of Artificial Sequence: Synthetic oligonucleotide
agacugccagacauugacc

SEQ ID NO: 2591 - RNA, 19 nt, Artificial Sequence
  Description of Artificial Sequence: Synthetic oligonucleotide
caagaccaucugugcuccu

SEQ ID NO: 2592 - RNA, 19 nt, Artificial Sequence
  Description of Artificial Sequence: Synthetic oligonucleotide
ucaguguaauggucacugc

SEQ ID NO: 2593 - RNA, 19 nt, Artificial Sequence
  Description of Artificial Sequence: Synthetic oligonucleotide
cuuugggcccaaccccaac

SEQ ID NO: 2594 - RNA, 19 nt, Artificial Sequence
  Description of Artificial Sequence: Synthetic oligonucleotide
ccagugcugccaugaugag

SEQ ID NO: 2595 - RNA, 19 nt, Artificial Sequence
  Description of Artificial Sequence: Synthetic oligonucleotide
gugugccgggggcugcuca

SEQ ID NO: 2596 - RNA, 19 nt, Artificial Sequence
  Description of Artificial Sequence: Synthetic oligonucleotide
aggcccucaggacacagac

SEQ ID NO: 2597 - RNA, 19 nt, Artificial Sequence
  Description of Artificial Sequence: Synthetic oligonucleotide
cugcuuugccugccggcac

SEQ ID NO: 2598 - RNA, 19 nt, Artificial Sequence
  Description of Artificial Sequence: Synthetic oligonucleotide
cuucaaugacaguggagcc

SEQ ID NO: 2599 - RNA, 19 nt, Artificial Sequence
  Description of Artificial Sequence: Synthetic oligonucleotide
cuguguaccucgcugucca

SEQ ID NO: 2600 - RNA, 19 nt, Artificial Sequence
  Description of Artificial Sequence: Synthetic oligonucleotide
acagccucuugucuacaac

SEQ ID NO: 2601 - RNA, 19 nt, Artificial Sequence
  Description of Artificial Sequence: Synthetic oligonucleotide
caagcuaacuuuccagcug

SEQ ID NO: 2602 - RNA, 19 nt, Artificial Sequence
  Description of Artificial Sequence: Synthetic oligonucleotide
ggaacccaauccccacacc

SEQ ID NO: 2603 - RNA, 19 nt, Artificial Sequence
  Description of Artificial Sequence: Synthetic oligonucleotide
caaguaucaguauggagga

SEQ ID NO: 2604 - RNA, 19 nt, Artificial Sequence
  Description of Artificial Sequence: Synthetic oligonucleotide
aguuuguguagccagcugu

SEQ ID NO: 2605 - RNA, 19 nt, Artificial Sequence
  Description of Artificial Sequence: Synthetic oligonucleotide
uccccauaacuuuguggug

SEQ ID NO: 2606 - RNA, 19 nt, Artificial Sequence
  Description of Artificial Sequence: Synthetic oligonucleotide
ggaucaaacauccuguguc

SEQ ID NO: 2607 - RNA, 19 nt, Artificial Sequence
  Description of Artificial Sequence: Synthetic oligonucleotide
cagggccuguccuccugac

SEQ ID NO: 2608 - RNA, 19 nt, Artificial Sequence
  Description of Artificial Sequence: Synthetic oligonucleotide
caagauggaaguagauaaa

SEQ ID NO: 2609 - RNA, 19 nt, Artificial Sequence
  Description of Artificial Sequence: Synthetic oligonucleotide
aaaugggcucaagaugugu

SEQ ID NO: 2610 - RNA, 19 nt, Artificial Sequence
  Description of Artificial Sequence: Synthetic oligonucleotide
ugagccuugugggggacua

SEQ ID NO: 2611 - RNA, 19 nt, Artificial Sequence
  Description of Artificial Sequence: Synthetic oligonucleotide
augucccaaagccugugag

SEQ ID NO: 2612 - RNA, 19 nt, Artificial Sequence
  Description of Artificial Sequence: Synthetic oligonucleotide
gggaacaggcucugggagc

SEQ ID NO: 2613 - RNA, 19 nt, Artificial Sequence
  Description of Artificial Sequence: Synthetic oligonucleotide
ccgcuuccagacuguggac

SEQ ID NO: 2614 - RNA, 19 nt, Artificial Sequence
  Description of Artificial Sequence: Synthetic oligonucleotide
cucgagcaacauugaugga

SEQ ID NO: 2615 - RNA, 19 nt, Artificial Sequence
  Description of Artificial Sequence: Synthetic oligonucleotide
auuugugaacugcaccaag

SEQ ID NO: 2616 - RNA, 19 nt, Artificial Sequence
  Description of Artificial Sequence: Synthetic oligonucleotide
gauccugggcaaccuggac

SEQ ID NO: 2617 - RNA, 19 nt, Artificial Sequence
  Description of Artificial Sequence: Synthetic oligonucleotide
cuuucugaucaccggccuc

SEQ ID NO: 2618 - RNA, 19 nt, Artificial Sequence
  Description of Artificial Sequence: Synthetic oligonucleotide
caauggagaccccuggcac

SEQ ID NO: 2619 - RNA, 19 nt, Artificial Sequence
  Description of Artificial Sequence: Synthetic oligonucleotide
caagaucccugcccuggac

SEQ ID NO: 2620 - RNA, 19 nt, Artificial Sequence
  Description of Artificial Sequence: Synthetic oligonucleotide
cccagagaagcucaauguc

SEQ ID NO: 2621 - RNA, 19 nt, Artificial Sequence
  Description of Artificial Sequence: Synthetic oligonucleotide
cuuccggacaguacgggag

SEQ ID NO: 2622 - RNA, 19 nt, Artificial Sequence
  Description of Artificial Sequence: Synthetic oligonucleotide
gaucacagguuaccugaac

SEQ ID NO: 2623 - RNA, 19 nt, Artificial Sequence
  Description of Artificial Sequence: Synthetic oligonucleotide
cauccaguccuggccgccc

SEQ ID NO: 2624 - RNA, 19 nt, Artificial Sequence
  Description of Artificial Sequence: Synthetic oligonucleotide
ccacaugcacaacuucagu

SEQ ID NO: 2625 - RNA, 19 nt, Artificial Sequence
  Description of Artificial Sequence: Synthetic oligonucleotide
uguuuuuuccaauuugaca

SEQ ID NO: 2626 - RNA, 19 nt, Artificial Sequence
  Description of Artificial Sequence: Synthetic oligonucleotide
aaccauuggaggcagaagc

SEQ ID NO: 2627 - RNA, 19 nt, Artificial Sequence
  Description of Artificial Sequence: Synthetic oligonucleotide
ccucuacaaccggggcuuc

SEQ ID NO: 2628 - RNA, 19 nt, Artificial Sequence
  Description of Artificial Sequence: Synthetic oligonucleotide
cucauuguugaucaugaag

SEQ ID NO: 2629 - RNA, 19 nt, Artificial Sequence
  Description of Artificial Sequence: Synthetic oligonucleotide
gaacuugaaugucacaucu

SEQ ID NO: 2630 - RNA, 19 nt, Artificial Sequence
  Description of Artificial Sequence: Synthetic oligonucleotide
ucugggcuuccgaucccug

SEQ ID NO: 2631 - RNA, 19 nt, Artificial Sequence
  Description of Artificial Sequence: Synthetic oligonucleotide
gaaggaaauuagugcuggg

SEQ ID NO: 2632 - RNA, 19 nt, Artificial Sequence
  Description of Artificial Sequence: Synthetic oligonucleotide
gcguaucuauauaagugcc

SEQ ID NO: 2633 - RNA, 19 nt, Artificial Sequence
  Description of Artificial Sequence: Synthetic oligonucleotide
caauaggcagcucugcuac

SEQ ID NO: 2634 - RNA, 19 nt, Artificial Sequence
  Description of Artificial Sequence: Synthetic oligonucleotide
ccaccacucuuugaacugg

SEQ ID NO: 2635 - RNA, 19 nt, Artificial Sequence
  Description of Artificial Sequence: Synthetic oligonucleotide
gaccaaggugcuucggggg

SEQ ID NO: 2636 - RNA, 19 nt, Artificial Sequence
  Description of Artificial Sequence: Synthetic oligonucleotide
gccuacggaagagcgacua

SEQ ID NO: 2637 - RNA, 19 nt, Artificial Sequence
  Description of Artificial Sequence: Synthetic oligonucleotide
agacaucaagcauaaucgg

SEQ ID NO: 2638 - RNA, 19 nt, Artificial Sequence
  Description of Artificial Sequence: Synthetic oligonucleotide
gccgcgcagagacugcgug

SEQ ID NO: 2639 - RNA, 19 nt, Artificial Sequence
  Description of Artificial Sequence: Synthetic oligonucleotide
ggcagagggcaaagugugu

SEQ ID NO: 2640 - RNA, 19 nt, Artificial Sequence
  Description of Artificial Sequence: Synthetic oligonucleotide
ugacccacugugcuccucu

SEQ ID NO: 2641 - RNA, 19 nt, Artificial Sequence
  Description of Artificial Sequence: Synthetic oligonucleotide
ugggggaugcuggggccca

SEQ ID NO: 2642 - RNA, 19 nt, Artificial Sequence
  Description of Artificial Sequence: Synthetic oligonucleotide
aggcccuggucagugcuug

SEQ ID NO: 2643 - RNA, 19 nt, Artificial Sequence
  Description of Artificial Sequence: Synthetic oligonucleotide
guccugucgaaauuauagc

SEQ ID NO: 2644 - RNA, 19 nt, Artificial Sequence
  Description of Artificial Sequence: Synthetic oligonucleotide
ccgaggaggugucugugug

SEQ ID NO: 2645 - RNA, 19 nt, Artificial Sequence
  Description of Artificial Sequence: Synthetic oligonucleotide
gacccacugcaacuuucug

SEQ ID NO: 2646 - RNA, 19 nt, Artificial Sequence
  Description of Artificial Sequence: Synthetic oligonucleotide
gaauggggagccucgagaa

SEQ ID NO: 2647 - RNA, 19 nt, Artificial Sequence
  Description of Artificial Sequence: Synthetic oligonucleotide
auuugcccaugaggccgaa

SEQ ID NO: 2648 - RNA, 19 nt, Artificial Sequence
  Description of Artificial Sequence: Synthetic oligonucleotide
augcuucuccugccacccg

SEQ ID NO: 2649 - RNA, 19 nt, Artificial Sequence
  Description of Artificial Sequence: Synthetic oligonucleotide
ggaaugccaacccauggag

SEQ ID NO: 2650 - RNA, 19 nt, Artificial Sequence
  Description of Artificial Sequence: Synthetic oligonucleotide
gggcacugccacaugcaau

SEQ ID NO: 2651 - RNA, 19 nt, Artificial Sequence
  Description of Artificial Sequence: Synthetic oligonucleotide
uggcucgggcucugauacu

SEQ ID NO: 2652 - RNA, 19 nt, Artificial Sequence
  Description of Artificial Sequence: Synthetic oligonucleotide
uugugcucaaugugcccau

SEQ ID NO: 2653 - RNA, 19 nt, Artificial Sequence
  Description of Artificial Sequence: Synthetic oligonucleotide
uuuucgagaugggccccac

SEQ ID NO: 2654 - RNA, 19 nt, Artificial Sequence
  Description of Artificial Sequence: Synthetic oligonucleotide
cugugugagcagcugcccc

SEQ ID NO: 2655 - RNA, 19 nt, Artificial Sequence
  Description of Artificial Sequence: Synthetic oligonucleotide
ccauggaguccuaggugcc

SEQ ID NO: 2656 - RNA, 19 nt, Artificial Sequence
  Description of Artificial Sequence: Synthetic oligonucleotide
caagggcccaaucuacaag

SEQ ID NO: 2657 - RNA, 19 nt, Artificial Sequence
  Description of Artificial Sequence: Synthetic oligonucleotide
guacccagauguucagaau

SEQ ID NO: 2658 - RNA, 19 nt, Artificial Sequence
  Description of Artificial Sequence: Synthetic oligonucleotide
ugaaugucggcccugccau

SEQ ID NO: 2659 - RNA, 19 nt, Artificial Sequence
  Description of Artificial Sequence: Synthetic oligonucleotide
ugagaacugcacccagggg

SEQ ID NO: 2660 - RNA, 19 nt, Artificial Sequence
  Description of Artificial Sequence: Synthetic oligonucleotide
guguaaaggaccagagcuu

SEQ ID NO: 2661 - RNA, 19 nt, Artificial Sequence
  Description of Artificial Sequence: Synthetic oligonucleotide
ucaagacuguuuaggacaa

SEQ ID NO: 2662 - RNA, 19 nt, Artificial Sequence
  Description of Artificial Sequence: Synthetic oligonucleotide
aacacuggugcugaucggc

SEQ ID NO: 2663 - RNA, 19 nt, Artificial Sequence
  Description of Artificial Sequence: Synthetic oligonucleotide
caaaacccaucugacaaug

SEQ ID NO: 2664 - RNA, 19 nt, Artificial Sequence
  Description of Artificial Sequence: Synthetic oligonucleotide
ggcuuugacagugauagca

SEQ ID NO: 2665 - RNA, 19 nt, Artificial Sequence
  Description of Artificial Sequence: Synthetic oligonucleotide
aggauugguagugauuuuc

SEQ ID NO: 2666 - RNA, 19 nt, Artificial Sequence
  Description of Artificial Sequence: Synthetic oligonucleotide
caugaugcugggcggcacu

SEQ ID NO: 2667 - RNA, 19 nt, Artificial Sequence
  Description of Artificial Sequence: Synthetic oligonucleotide
uuuucucuacuggcguggg

SEQ ID NO: 2668 - RNA, 19 nt, Artificial Sequence
  Description of Artificial Sequence: Synthetic oligonucleotide
gcgccggauucagaauaaa

SEQ ID NO: 2669 - RNA, 19 nt, Artificial Sequence
  Description of Artificial Sequence: Synthetic oligonucleotide
aagggcuaugaggcgauac

SEQ ID NO: 2670 - RNA, 19 nt, Artificial Sequence
  Description of Artificial Sequence: Synthetic oligonucleotide
cuuggaacggggugagagc

SEQ ID NO: 2671 - RNA, 19 nt, Artificial Sequence
  Description of Artificial Sequence: Synthetic oligonucleotide
cauagagccucuggacccc

SEQ ID NO: 2672 - RNA, 19 nt, Artificial Sequence
  Description of Artificial Sequence: Synthetic oligonucleotide
cagugagaaggcuaacaaa

SEQ ID NO: 2673 - RNA, 19 nt, Artificial Sequence
  Description of Artificial Sequence: Synthetic oligonucleotide
agucuuggccagaaucuuc

SEQ ID NO: 2674 - RNA, 19 nt, Artificial Sequence
  Description of Artificial Sequence: Synthetic oligonucleotide
caaagagacagagcuaagg

SEQ ID NO: 2675 - RNA, 19 nt, Artificial Sequence
  Description of Artificial Sequence: Synthetic oligonucleotide
gaagcuuaaagugcuuggc

SEQ ID NO: 2676 - RNA, 19 nt, Artificial Sequence
  Description of Artificial Sequence: Synthetic oligonucleotide
cucgggugucuuuggaacu

SEQ ID NO: 2677 - RNA, 19 nt, Artificial Sequence
  Description of Artificial Sequence: Synthetic oligonucleotide
ugugcacaaaggagugugg

SEQ ID NO: 2678 - RNA, 19 nt, Artificial Sequence
  Description of Artificial Sequence: Synthetic oligonucleotide
gaucccugagggugaauca

SEQ ID NO: 2679 - RNA, 19 nt, Artificial Sequence
  Description of Artificial Sequence: Synthetic oligonucleotide
aaucaagauuccagucugc

SEQ ID NO: 2680 - RNA, 19 nt, Artificial Sequence
  Description of Artificial Sequence: Synthetic oligonucleotide
cauuaaagucauugaggac

SEQ ID NO: 2681 - RNA, 19 nt, Artificial Sequence
  Description of Artificial Sequence: Synthetic oligonucleotide
caagaguggacggcagagu

SEQ ID NO: 2682 - RNA, 19 nt, Artificial Sequence
  Description of Artificial Sequence: Synthetic oligonucleotide
uuuucaagcugugacagau

SEQ ID NO: 2683 - RNA, 19 nt, Artificial Sequence
  Description of Artificial Sequence: Synthetic oligonucleotide
ucauaugcuggccauuggc

SEQ ID NO: 2684 - RNA, 19 nt, Artificial Sequence
  Description of Artificial Sequence: Synthetic oligonucleotide
cagccuggaccaugcccac

SEQ ID NO: 2685 - RNA, 19 nt, Artificial Sequence
  Description of Artificial Sequence: Synthetic oligonucleotide
cauuguaaggcugcuggga

SEQ ID NO: 2686 - RNA, 19 nt, Artificial Sequence
  Description of Artificial Sequence: Synthetic oligonucleotide
acuaugcccagggucaucu

SEQ ID NO: 2687 - RNA, 19 nt, Artificial Sequence
  Description of Artificial Sequence: Synthetic oligonucleotide
ucugcagcuugucacucaa

SEQ ID NO: 2688 - RNA, 19 nt, Artificial Sequence
  Description of Artificial Sequence: Synthetic oligonucleotide
auauuugccucuggguucu

SEQ ID NO: 2689 - RNA, 19 nt, Artificial Sequence
  Description of Artificial Sequence: Synthetic oligonucleotide
ucugcuggaucaugugaga

SEQ ID NO: 2690 - RNA, 19 nt, Artificial Sequence
  Description of Artificial Sequence: Synthetic oligonucleotide
acaacaccggggggcacug

SEQ ID NO: 2691 - RNA, 19 nt, Artificial Sequence
  Description of Artificial Sequence: Synthetic oligonucleotide
ggggccacagcugcugcuc

SEQ ID NO: 2692 - RNA, 19 nt, Artificial Sequence
  Description of Artificial Sequence: Synthetic oligonucleotide
caacuggggaguacaaauu

SEQ ID NO: 2693 - RNA, 19 nt, Artificial Sequence
  Description of Artificial Sequence: Synthetic oligonucleotide
ugccaagggaauguacuac

SEQ ID NO: 2694 - RNA, 19 nt, Artificial Sequence
  Description of Artificial Sequence: Synthetic oligonucleotide
ccuugaggaacaugguaug

SEQ ID NO: 2695 - RNA, 19 nt, Artificial Sequence
  Description of Artificial Sequence: Synthetic oligonucleotide
ggugcauagaaaccuggcu

SEQ ID NO: 2696 - RNA, 19 nt, Artificial Sequence
  Description of Artificial Sequence: Synthetic oligonucleotide
ugcccgaaacgugcuacuc

SEQ ID NO: 2697 - RNA, 19 nt, Artificial Sequence
  Description of Artificial Sequence: Synthetic oligonucleotide
caagucacccagucagguu

SEQ ID NO: 2698 - RNA, 19 nt, Artificial Sequence
  Description of Artificial Sequence: Synthetic oligonucleotide
ucagguggcagauuuuggu

SEQ ID NO: 2699 - RNA, 19 nt, Artificial Sequence
  Description of Artificial Sequence: Synthetic oligonucleotide
uguggcugaccugcugccu

SEQ ID NO: 2700 - RNA, 19 nt, Artificial Sequence
  Description of Artificial Sequence: Synthetic oligonucleotide
uccugaugauaagcagcug

SEQ ID NO: 2701 - RNA, 19 nt, Artificial Sequence
  Description of Artificial Sequence: Synthetic oligonucleotide
gcuauacagugaggccaag

SEQ ID NO: 2702 - RNA, 19 nt, Artificial Sequence
  Description of Artificial Sequence: Synthetic oligonucleotide
gacuccaauuaaguggaug

SEQ ID NO: 2703 - RNA, 19 nt, Artificial Sequence
  Description of Artificial Sequence: Synthetic oligonucleotide
ggcccuugagaguauccac

SEQ ID NO: 2704 - RNA, 19 nt, Artificial Sequence
  Description of Artificial Sequence: Synthetic oligonucleotide
cuuugggaaauacacacac

SEQ ID NO: 2705 - RNA, 19 nt, Artificial Sequence
  Description of Artificial Sequence: Synthetic oligonucleotide
ccagagugaugucuggagc

SEQ ID NO: 2706 - RNA, 19 nt, Artificial Sequence
  Description of Artificial Sequence: Synthetic oligonucleotide
cuauggugugacaguuugg

SEQ ID NO: 2707 - RNA, 19 nt, Artificial Sequence
  Description of Artificial Sequence: Synthetic oligonucleotide
ggaguugaugaccuucggg

SEQ ID NO: 2708 - RNA, 19 nt, Artificial Sequence
  Description of Artificial Sequence: Synthetic oligonucleotide
ggcagagcccuaugcaggg

SEQ ID NO: 2709 - RNA, 19 nt, Artificial Sequence
  Description of Artificial Sequence: Synthetic oligonucleotide
gcuacgauuggcugaagua

SEQ ID NO: 2710 - RNA, 19 nt, Artificial Sequence
  Description of Artificial Sequence: Synthetic oligonucleotide
accagaccugcuagagaag

SEQ ID NO: 2711 - RNA, 19 nt, Artificial Sequence
  Description of Artificial Sequence: Synthetic oligonucleotide
gggggagcgguuggcacag

SEQ ID NO: 2712 - RNA, 19 nt, Artificial Sequence
  Description of Artificial Sequence: Synthetic oligonucleotide
gccccagaucugcacaauu

SEQ ID NO: 2713 - RNA, 19 nt, Artificial Sequence
  Description of Artificial Sequence: Synthetic oligonucleotide
ugaugucuacauggugaug

SEQ ID NO: 2714 - RNA, 19 nt, Artificial Sequence
  Description of Artificial Sequence: Synthetic oligonucleotide
ggucaaguguuggaugauu

SEQ ID NO: 2715 - RNA, 19 nt, Artificial Sequence
  Description of Artificial Sequence: Synthetic oligonucleotide
ugaugagaacauucgccca

SEQ ID NO: 2716 - RNA, 19 nt, Artificial Sequence
  Description of Artificial Sequence: Synthetic oligonucleotide
aaccuuuaaagaacuagcc

SEQ ID NO: 2717 - RNA, 19 nt, Artificial Sequence
  Description of Artificial Sequence: Synthetic oligonucleotide
caaugaguucaccaggaug

SEQ ID NO: 2718 - RNA, 19 nt, Artificial Sequence
  Description of Artificial Sequence: Synthetic oligonucleotide
ggcccgagacccaccacgg

SEQ ID NO: 2719 - RNA, 19 nt, Artificial Sequence
  Description of Artificial Sequence: Synthetic oligonucleotide
guaucuggucauaaagaga

SEQ ID NO: 2720 - RNA, 19 nt, Artificial Sequence
  Description of Artificial Sequence: Synthetic oligonucleotide
agagagugggccuggaaua

SEQ ID NO: 2721 - RNA, 19 nt, Artificial Sequence
  Description of Artificial Sequence: Synthetic oligonucleotide
agccccugggccagagccc

SEQ ID NO: 2722 - RNA, 19 nt, Artificial Sequence
  Description of Artificial Sequence: Synthetic oligonucleotide
ccauggucugacaaacaag

SEQ ID NO: 2723 - RNA, 19 nt, Artificial Sequence
  Description of Artificial Sequence: Synthetic oligonucleotide
gaagcuagaggaaguagag

SEQ ID NO: 2724 - RNA, 19 nt, Artificial Sequence
  Description of Artificial Sequence: Synthetic oligonucleotide
gcuggagccagaacuagac

SEQ ID NO: 2725 - RNA, 19 nt, Artificial Sequence
  Description of Artificial Sequence: Synthetic oligonucleotide
ccuagaccuagacuuggaa

SEQ ID NO: 2726 - RNA, 19 nt, Artificial Sequence
  Description of Artificial Sequence: Synthetic oligonucleotide
agcagaggaggacaaccug

SEQ ID NO: 2727 - RNA, 19 nt, Artificial Sequence
  Description of Artificial Sequence: Synthetic oligonucleotide
ggcaaccaccacacugggc

SEQ ID NO: 2728 - RNA, 19 nt, Artificial Sequence
  Description of Artificial Sequence: Synthetic oligonucleotide
cuccgcccucagccuacca

SEQ ID NO: 2729 - RNA, 19 nt, Artificial Sequence
  Description of Artificial Sequence: Synthetic oligonucleotide
aguuggaacacuuaaucgg

SEQ ID NO: 2730 - RNA, 19 nt, Artificial Sequence
  Description of Artificial Sequence: Synthetic oligonucleotide
gccacgugggagccagagc

SEQ ID NO: 2731 - RNA, 19 nt, Artificial Sequence
  Description of Artificial Sequence: Synthetic oligonucleotide
ccuuuuaaguccaucaucu

SEQ ID NO: 2732 - RNA, 19 nt, Artificial Sequence
  Description of Artificial Sequence: Synthetic oligonucleotide
uggauacaugcccaugaac

SEQ ID NO: 2733 - RNA, 19 nt, Artificial Sequence
  Description of Artificial Sequence: Synthetic oligonucleotide
ccaggguaaucuuggggag

SEQ ID NO: 2734 - RNA, 19 nt, Artificial Sequence
  Description of Artificial Sequence: Synthetic oligonucleotide
gucuugccaggagucugca

SEQ ID NO: 2735 - RNA, 19 nt, Artificial Sequence
  Description of Artificial Sequence: Synthetic oligonucleotide
aguuucugggagcagugaa

SEQ ID NO: 2736 - RNA, 19 nt, Artificial Sequence
  Description of Artificial Sequence: Synthetic oligonucleotide
acggugcccccguccaguc

SEQ ID NO: 2737 - RNA, 19 nt, Artificial Sequence
  Description of Artificial Sequence: Synthetic oligonucleotide
cucucuacacccaaugcca

SEQ ID NO: 2738 - RNA, 19 nt, Artificial Sequence
  Description of Artificial Sequence: Synthetic oligonucleotide
acggggaugccuggcauca

SEQ ID NO: 2739 - RNA, 19 nt, Artificial Sequence
  Description of Artificial Sequence: Synthetic oligonucleotide
agagucaucagaggggcau

SEQ ID NO: 2740 - RNA, 19 nt, Artificial Sequence
  Description of Artificial Sequence: Synthetic oligonucleotide
uguaacaggcucugaggcu

SEQ ID NO: 2741 - RNA, 19 nt, Artificial Sequence
  Description of Artificial Sequence: Synthetic oligonucleotide
ugagcuccaggagaaagug

SEQ ID NO: 2742 - RNA, 19 nt, Artificial Sequence
  Description of Artificial Sequence: Synthetic oligonucleotide
gucaauguguaggagccgg

SEQ ID NO: 2743 - RNA, 19 nt, Artificial Sequence
  Description of Artificial Sequence: Synthetic oligonucleotide
gagcaggagccggagccca

SEQ ID NO: 2744 - RNA, 19 nt, Artificial Sequence
  Description of Artificial Sequence: Synthetic oligonucleotide
acggccacgcggagauagc

SEQ ID NO: 2745 - RNA, 19 nt, Artificial Sequence
  Description of Artificial Sequence: Synthetic oligonucleotide
cgccuaccauucccagcgc

SEQ ID NO: 2746 - RNA, 19 nt, Artificial Sequence
  Description of Artificial Sequence: Synthetic oligonucleotide
ccacagucugcugacuccu

SEQ ID NO: 2747 - RNA, 19 nt, Artificial Sequence
  Description of Artificial Sequence: Synthetic oligonucleotide
uguuaccccacucucccca

SEQ ID NO: 2748 - RNA, 19 nt, Artificial Sequence
  Description of Artificial Sequence: Synthetic oligonucleotide
acccggguuagaggaagag

SEQ ID NO: 2749 - RNA, 19 nt, Artificial Sequence
  Description of Artificial Sequence: Synthetic oligonucleotide
ggaugucaacgguuauguc

SEQ ID NO: 2750 - RNA, 19 nt, Artificial Sequence
  Description of Artificial Sequence: Synthetic oligonucleotide
caugccagauacacaccuc

SEQ ID NO: 2751 - RNA, 19 nt, Artificial Sequence
  Description of Artificial Sequence: Synthetic oligonucleotide
caaagguacucccuccucc

SEQ ID NO: 2752 - RNA, 19 nt, Artificial Sequence
  Description of Artificial Sequence: Synthetic oligonucleotide
ccgggaaggcacccuuucu

SEQ ID NO: 2753 - RNA, 19 nt, Artificial Sequence
  Description of Artificial Sequence: Synthetic oligonucleotide
uucagugggucucaguucu

SEQ ID NO: 2754 - RNA, 19 nt, Artificial Sequence
  Description of Artificial Sequence: Synthetic oligonucleotide
uguccuggguacugaagaa

SEQ ID NO: 2755 - RNA, 19 nt, Artificial Sequence
  Description of Artificial Sequence: Synthetic oligonucleotide
agaagaugaagaugaggag

SEQ ID NO: 2756 - RNA, 19 nt, Artificial Sequence
  Description of Artificial Sequence: Synthetic oligonucleotide
guaugaauacaugaaccgg

SEQ ID NO: 2757 - RNA, 19 nt, Artificial Sequence
  Description of Artificial Sequence: Synthetic oligonucleotide
gaggagaaggcacagucca

SEQ ID NO: 2758 - RNA, 19 nt, Artificial Sequence
  Description of Artificial Sequence: Synthetic oligonucleotide
accucaucccccuaggcca

SEQ ID NO: 2759 - RNA, 19 nt, Artificial Sequence
  Description of Artificial Sequence: Synthetic oligonucleotide
aaguucccuugaggagcug

SEQ ID NO: 2760 - RNA, 19 nt, Artificial Sequence
  Description of Artificial Sequence: Synthetic oligonucleotide
ggguuaugaguacauggau

SEQ ID NO: 2761 - RNA, 19 nt, Artificial Sequence
  Description of Artificial Sequence: Synthetic oligonucleotide
uguggggucagaccucagu

SEQ ID NO: 2762 - RNA, 19 nt, Artificial Sequence
  Description of Artificial Sequence: Synthetic oligonucleotide
ugccucucugggcagcaca

SEQ ID NO: 2763 - RNA, 19 nt, Artificial Sequence
  Description of Artificial Sequence: Synthetic oligonucleotide
acagaguugcccacuccac

SEQ ID NO: 2764 - RNA, 19 nt, Artificial Sequence
  Description of Artificial Sequence: Synthetic oligonucleotide
cccuguacccaucaugccc

SEQ ID NO: 2765 - RNA, 19 nt, Artificial Sequence
  Description of Artificial Sequence: Synthetic oligonucleotide
cacugcaggcacaacucca

SEQ ID NO: 2766 - RNA, 19 nt, Artificial Sequence
  Description of Artificial Sequence: Synthetic oligonucleotide
agaugaagacuaugaauau

SEQ ID NO: 2767 - RNA, 19 nt, Artificial Sequence
  Description of Artificial Sequence: Synthetic oligonucleotide
uaugaaucggcaacgagau

SEQ ID NO: 2768 - RNA, 19 nt, Artificial Sequence
  Description of Artificial Sequence: Synthetic oligonucleotide
uggaggugguccugggggu

SEQ ID NO: 2769 - RNA, 19 nt, Artificial Sequence
  Description of Artificial Sequence: Synthetic oligonucleotide
ugauuaugcagccaugggg

SEQ ID NO: 2770 - RNA, 19 nt, Artificial Sequence
  Description of Artificial Sequence: Synthetic oligonucleotide
ggccugcccagcaucugag

SEQ ID NO: 2771 - RNA, 19 nt, Artificial Sequence
  Description of Artificial Sequence: Synthetic oligonucleotide
gcaaggguaugaagagaug

SEQ ID NO: 2772 - RNA, 19 nt, Artificial Sequence
  Description of Artificial Sequence: Synthetic oligonucleotide
gagagcuuuucaggggccu

SEQ ID NO: 2773 - RNA, 19 nt, Artificial Sequence
  Description of Artificial Sequence: Synthetic oligonucleotide
uggacaucaggccccccau

SEQ ID NO: 2774 - RNA, 19 nt, Artificial Sequence
  Description of Artificial Sequence: Synthetic oligonucleotide
uguccauuaugcccgccua

SEQ ID NO: 2775 - RNA, 19 nt, Artificial Sequence
  Description of Artificial Sequence: Synthetic oligonucleotide
aaaaacucuacguagcuua

SEQ ID NO: 2776 - RNA, 19 nt, Artificial Sequence
  Description of Artificial Sequence: Synthetic oligonucleotide
agaggcuacagacucugcc

SEQ ID NO: 2777 - RNA, 19 nt, Artificial Sequence
  Description of Artificial Sequence: Synthetic oligonucleotide
cuuugauaacccugauuac

SEQ ID NO: 2778 - RNA, 19 nt, Artificial Sequence
  Description of Artificial Sequence: Synthetic oligonucleotide
cuggcauagcaggcuuuuc

SEQ ID NO: 2779 - RNA, 19 nt, Artificial Sequence
  Description of Artificial Sequence: Synthetic oligonucleotide
ccccaaggcuaaugcccag

SEQ ID NO: 2780 - RNA, 19 nt, Artificial Sequence
  Description of Artificial Sequence: Synthetic oligonucleotide
gagaacguaacuccugcuc

SEQ ID NO: 2781 - RNA, 19 nt, Artificial Sequence
  Description of Artificial Sequence: Synthetic oligonucleotide
cccuguggcacucagggag

SEQ ID NO: 2782 - RNA, 19 nt, Artificial Sequence
  Description of Artificial Sequence: Synthetic oligonucleotide
gcauuuaauggcagcuagu

SEQ ID NO: 2783 - RNA, 19 nt, Artificial Sequence
  Description of Artificial Sequence: Synthetic oligonucleotide
ugccuuuagaggguaccgu

SEQ ID NO: 2784 - RNA, 19 nt, Artificial Sequence
  Description of Artificial Sequence: Synthetic oligonucleotide
ucuucucccuauucccucu

SEQ ID NO: 2785 - RNA, 19 nt, Artificial Sequence
  Description of Artificial Sequence: Synthetic oligonucleotide
ucucucccaggucccagcc

SEQ ID NO: 2786 - RNA, 19 nt, Artificial Sequence
  Description of Artificial Sequence: Synthetic oligonucleotide
cccuuuuccccagucccag

SEQ ID NO: 2787 - RNA, 19 nt, Artificial Sequence
  Description of Artificial Sequence: Synthetic oligonucleotide
gacaauuccauucaaucuu

SEQ ID NO: 2788 - RNA, 19 nt, Artificial Sequence
  Description of Artificial Sequence: Synthetic oligonucleotide
uuggaggcuuuuaaacauu

SEQ ID NO: 2789 - RNA, 19 nt, Artificial Sequence
  Description of Artificial Sequence: Synthetic oligonucleotide
uuugacacaaaauucuuau

SEQ ID NO: 2790 - RNA, 19 nt, Artificial Sequence
  Description of Artificial Sequence: Synthetic oligonucleotide
ugguauguagccagcugug

SEQ ID NO: 2791 - RNA, 19 nt, Artificial Sequence
  Description of Artificial Sequence: Synthetic oligonucleotide
gcacuuucuucucuuuccc

SEQ ID NO: 2792 - RNA, 19 nt, Artificial Sequence
  Description of Artificial Sequence: Synthetic oligonucleotide
caaccccaggaaagguuuu

SEQ ID NO: 2793 - RNA, 19 nt, Artificial Sequence
  Description of Artificial Sequence: Synthetic oligonucleotide
uccuuauuuugugugcuuu

SEQ ID NO: 2794 - RNA, 19 nt, Artificial Sequence
  Description of Artificial Sequence: Synthetic oligonucleotide
ucccagucccauuccucag

SEQ ID NO: 2795 - RNA, 19 nt, Artificial Sequence
  Description of Artificial Sequence: Synthetic oligonucleotide
gcuucuucacaggcacucc

SEQ ID NO: 2796 - RNA, 19 nt, Artificial Sequence
  Description of Artificial Sequence: Synthetic oligonucleotide
cuggagauaugaaggauua

SEQ ID NO: 2797 - RNA, 19 nt, Artificial Sequence
  Description of Artificial Sequence: Synthetic oligonucleotide
acucuccauaucccuuccu

SEQ ID NO: 2798 - RNA, 19 nt, Artificial Sequence
  Description of Artificial Sequence: Synthetic oligonucleotide
ucucaggcucuugacuacu

SEQ ID NO: 2799 - RNA, 19 nt, Artificial Sequence
  Description of Artificial Sequence: Synthetic oligonucleotide
uuggaacuaggcucuuaug

SEQ ID NO: 2800 - RNA, 19 nt, Artificial Sequence
  Description of Artificial Sequence: Synthetic oligonucleotide
gugugccuuuguuucccau

SEQ ID NO: 2801 - RNA, 19 nt, Artificial Sequence
  Description of Artificial Sequence: Synthetic oligonucleotide
ucagacugucaagaagagg

SEQ ID NO: 2802 - RNA, 19 nt, Artificial Sequence
  Description of Artificial Sequence: Synthetic oligonucleotide
gaaagggaggaaaccuagc

SEQ ID NO: 2803 - RNA, 19 nt, Artificial Sequence
  Description of Artificial Sequence: Synthetic oligonucleotide
cagaggaaaguguaauuuu

SEQ ID NO: 2804 - RNA, 19 nt, Artificial Sequence
  Description of Artificial Sequence: Synthetic oligonucleotide
ugguuuaugacucuuaacc

SEQ ID NO: 2805 - RNA, 19 nt, Artificial Sequence
  Description of Artificial Sequence: Synthetic oligonucleotide
ccccuagaaagacagaagc

SEQ ID NO: 2806 - RNA, 19 nt, Artificial Sequence
  Description of Artificial Sequence: Synthetic oligonucleotide
cuuaaaaucugugaagaaa

SEQ ID NO: 2807 - RNA, 19 nt, Artificial Sequence
  Description of Artificial Sequence: Synthetic oligonucleotide
agagguuaggaguagauau

SEQ ID NO: 2808 - RNA, 19 nt, Artificial Sequence
  Description of Artificial Sequence: Synthetic oligonucleotide
uugauuacuaucauaauuc

SEQ ID NO: 2809 - RNA, 19 nt, Artificial Sequence
  Description of Artificial Sequence: Synthetic oligonucleotide
cagcacuuaacuaugagcc

SEQ ID NO: 2810 - RNA, 19 nt, Artificial Sequence
  Description of Artificial Sequence: Synthetic oligonucleotide
caggcaucauacuaaacuu

SEQ ID NO: 2811 - RNA, 19 nt, Artificial Sequence
  Description of Artificial Sequence: Synthetic oligonucleotide
ucaccuacauuaucucacu

SEQ ID NO: 2812 - RNA, 19 nt, Artificial Sequence
  Description of Artificial Sequence: Synthetic oligonucleotide
uuaguccuuuaucauccuu

SEQ ID NO: 2813 - RNA, 19 nt, Artificial Sequence
  Description of Artificial Sequence: Synthetic oligonucleotide
uaaaacaauucugugacau

SEQ ID NO: 2814 - RNA, 19 nt, Artificial Sequence
  Description of Artificial Sequence: Synthetic oligonucleotide
uacauauuaucucauuuua

SEQ ID NO: 2815 - RNA, 19 nt, Artificial Sequence
  Description of Artificial Sequence: Synthetic oligonucleotide
acacaaagggaagucgggc

SEQ ID NO: 2816 - RNA, 19 nt, Artificial Sequence
  Description of Artificial Sequence: Synthetic oligonucleotide
caugguggcucaugccugu

SEQ ID NO: 2817 - RNA, 19 nt, Artificial Sequence
  Description of Artificial Sequence: Synthetic oligonucleotide
uaaucucagcacuuuggga

SEQ ID NO: 2818 - RNA, 19 nt, Artificial Sequence
  Description of Artificial Sequence: Synthetic oligonucleotide
aggcugaggcagaaggauu

SEQ ID NO: 2819 - RNA, 19 nt, Artificial Sequence
  Description of Artificial Sequence: Synthetic oligonucleotide
uaccugaggcaaggaguuu

SEQ ID NO: 2820 - RNA, 19 nt, Artificial Sequence
  Description of Artificial Sequence: Synthetic oligonucleotide
ugagaccagcuuagccaac

SEQ ID NO: 2821 - RNA, 19 nt, Artificial Sequence
  Description of Artificial Sequence: Synthetic oligonucleotide
cauaguaagacccccaucu

SEQ ID NO: 2822 - RNA, 19 nt, Artificial Sequence
  Description of Artificial Sequence: Synthetic oligonucleotide
uagaacugggugcaguggc

SEQ ID NO: 2823 - RNA, 19 nt, Artificial Sequence
  Description of Artificial Sequence: Synthetic oligonucleotide
cucaugccuguaaucccag

SEQ ID NO: 2824 - RNA, 19 nt, Artificial Sequence
  Description of Artificial Sequence: Synthetic oligonucleotide
gccagcacuuugggaggcu

SEQ ID NO: 2825 - RNA, 19 nt, Artificial Sequence
  Description of Artificial Sequence: Synthetic oligonucleotide
ugagaugggaagaucacuu

SEQ ID NO: 2826 - RNA, 19 nt, Artificial Sequence
  Description of Artificial Sequence: Synthetic oligonucleotide
ugagcccagaauuagagau

SEQ ID NO: 2827 - RNA, 19 nt, Artificial Sequence
  Description of Artificial Sequence: Synthetic oligonucleotide
uaagccuauggaaacauag

SEQ ID NO: 2828 - RNA, 19 nt, Artificial Sequence
  Description of Artificial Sequence: Synthetic oligonucleotide
gcaagacacugucucuaca

SEQ ID NO: 2829 - RNA, 19 nt, Artificial Sequence
  Description of Artificial Sequence: Synthetic oligonucleotide
aaacugagccuuaaagaga

SEQ ID NO: 2830 - RNA, 19 nt, Artificial Sequence
  Description of Artificial Sequence: Synthetic oligonucleotide
augaaauaaauuaagcagu

SEQ ID NO: 2831 - RNA, 19 nt, Artificial Sequence
  Description of Artificial Sequence: Synthetic oligonucleotide
uagauccaggaugcaaaau

SEQ ID NO: 2832 - RNA, 19 nt, Artificial Sequence
  Description of Artificial Sequence: Synthetic oligonucleotide
uccucccaauuccugugca

SEQ ID NO: 2833 - RNA, 19 nt, Artificial Sequence
  Description of Artificial Sequence: Synthetic oligonucleotide
augugcucuuauuguaagg

SEQ ID NO: 2834 - RNA, 19 nt, Artificial Sequence
  Description of Artificial Sequence: Synthetic oligonucleotide
gugccaagaaaaacugauu

SEQ ID NO: 2835 - RNA, 19 nt, Artificial Sequence
  Description of Artificial Sequence: Synthetic oligonucleotide
uuaaguuacagcccuuguu

SEQ ID NO: 2836 - RNA, 19 nt, Artificial Sequence
  Description of Artificial Sequence: Synthetic oligonucleotide
uuaaggggcacuguuucuu

SEQ ID NO: 2837 - RNA, 19 nt, Artificial Sequence
  Description of Artificial Sequence: Synthetic oligonucleotide
uguuuuugcacugaaucaa

SEQ ID NO: 2838 - RNA, 19 nt, Artificial Sequence
  Description of Artificial Sequence: Synthetic oligonucleotide
agucuaaccccaacagcca

SEQ ID NO: 2839 - RNA, 19 nt, Artificial Sequence
  Description of Artificial Sequence: Synthetic oligonucleotide
acauccuccuauaccuaga

SEQ ID NO: 2840 - RNA, 19 nt, Artificial Sequence
  Description of Artificial Sequence: Synthetic oligonucleotide
acaucucaucucaggaagu

SEQ ID NO: 2841 - RNA, 19 nt, Artificial Sequence
  Description of Artificial Sequence: Synthetic oligonucleotide
uggugguggggguagucag

SEQ ID NO: 2842 - RNA, 19 nt, Artificial Sequence
  Description of Artificial Sequence: Synthetic oligonucleotide
gaaggaaaaauaacuggac

SEQ ID NO: 2843 - RNA, 19 nt, Artificial Sequence
  Description of Artificial Sequence: Synthetic oligonucleotide
caucuuuguguaaaccaua

SEQ ID NO: 2844 - RNA, 19 nt, Artificial Sequence
  Description of Artificial Sequence: Synthetic oligonucleotide
aauccacaugugccguaaa

SEQ ID NO: 2845 - RNA, 19 nt, Artificial Sequence
  Description of Artificial Sequence: Synthetic oligonucleotide
augaucuucacuccuuauc

SEQ ID NO: 2846 - RNA, 19 nt, Artificial Sequence
  Description of Artificial Sequence: Synthetic oligonucleotide
ccgagggcaaauucacaag

SEQ ID NO: 2847 - RNA, 19 nt, Artificial Sequence
  Description of Artificial Sequence: Synthetic oligonucleotide
ggauccccaagauccacuu

SEQ ID NO: 2848 - RNA, 19 nt, Artificial Sequence
  Description of Artificial Sequence: Synthetic oligonucleotide
uuuagaagccauucucauc

SEQ ID NO: 2849 - RNA, 19 nt, Artificial Sequence
  Description of Artificial Sequence: Synthetic oligonucleotide
uagaagccauucucaucca

SEQ ID NO: 2850 - RNA, 25 nt, Artificial Sequence
  Description of Artificial Sequence: Synthetic oligonucleotide
acacacacacaccccuccccugcca

SEQ ID NO: 2851 - RNA, 25 nt, Artificial Sequence
  Description of Artificial Sequence: Synthetic oligonucleotide
aucccuccccggacuccggcuccgg

SEQ ID NO: 2852 - RNA, 25 nt, Artificial Sequence
  Description of Artificial Sequence: Synthetic oligonucleotide
gcuccgauugcaauuugcaaccucc

SEQ ID NO: 2853 - RNA, 25 nt, Artificial Sequence
  Description of Artificial Sequence: Synthetic oligonucleotide
cgcugccgucgccgcagcagccacc

SEQ ID NO: 2854 - RNA, 25 nt, Artificial Sequence
  Description of Artificial Sequence: Synthetic oligonucleotide
caauucgccagcgguucagguggcu

SEQ ID NO: 2855 - RNA, 25 nt, Artificial Sequence
  Description of Artificial Sequence: Synthetic oligonucleotide
ucuugccucgauguccuagccuagg

SEQ ID NO: 2856 - RNA, 25 nt, Artificial Sequence
  Description of Artificial Sequence: Synthetic oligonucleotide
gggcccccgggccggacuuggcugg

SEQ ID NO: 2857 - RNA, 25 nt, Artificial Sequence
  Description of Artificial Sequence: Synthetic oligonucleotide
ggcucccuucacccucugcggaguc

SEQ ID NO: 2858 - RNA, 25 nt, Artificial Sequence
  Description of Artificial Sequence: Synthetic oligonucleotide
caugagggcgaacgacgcucugcag

SEQ ID NO: 2859 - RNA, 25 nt, Artificial Sequence
  Description of Artificial Sequence: Synthetic oligonucleotide
ggugcugggcuugcuuuucagccug

SEQ ID NO: 2860 - RNA, 25 nt, Artificial Sequence
  Description of Artificial Sequence: Synthetic oligonucleotide
ggcccggggcuccgaggugggcaac

SEQ ID NO: 2861 - RNA, 25 nt, Artificial Sequence
  Description of Artificial Sequence: Synthetic oligonucleotide
cucucaggcaguguguccugggacu

SEQ ID NO: 2862 - RNA, 25 nt, Artificial Sequence
  Description of Artificial Sequence: Synthetic oligonucleotide
ucugaauggccugagugugaccggc

SEQ ID NO: 2863 - RNA, 25 nt, Artificial Sequence
  Description of Artificial Sequence: Synthetic oligonucleotide
cgaugcugagaaccaauaccagaca

SEQ ID NO: 2864 - RNA, 25 nt, Artificial Sequence
  Description of Artificial Sequence: Synthetic oligonucleotide
acuguacaagcucuacgagaggugu

SEQ ID NO: 2865 - RNA, 25 nt, Artificial Sequence
  Description of Artificial Sequence: Synthetic oligonucleotide
ugagguggugauggggaaccuugag

SEQ ID NO: 2866 - RNA, 25 nt, Artificial Sequence
  Description of Artificial Sequence: Synthetic oligonucleotide
gauugugcucacgggacacaaugcc

SEQ ID NO: 2867 - RNA, 25 nt, Artificial Sequence
  Description of Artificial Sequence: Synthetic oligonucleotide
cgaccucuccuuccugcaguggauu

SEQ ID NO: 2868 - RNA, 25 nt, Artificial Sequence
  Description of Artificial Sequence: Synthetic oligonucleotide
ucgagaagugacaggcuauguccuc

SEQ ID NO: 2869 - RNA, 25 nt, Artificial Sequence
  Description of Artificial Sequence: Synthetic oligonucleotide
cguggccaugaaugaauucucuacu

SEQ ID NO: 2870 - RNA, 25 nt, Artificial Sequence
  Description of Artificial Sequence: Synthetic oligonucleotide
ucuaccauugcccaaccuccgcgug

SEQ ID NO: 2871 - RNA, 25 nt, Artificial Sequence
  Description of Artificial Sequence: Synthetic oligonucleotide
ggugcgagggacccaggucuacgau

SEQ ID NO: 2872 - RNA, 25 nt, Artificial Sequence
  Description of Artificial Sequence: Synthetic oligonucleotide
ugggaaguuugccaucuucgucaug

SEQ ID NO: 2873 - RNA, 25 nt, Artificial Sequence
  Description of Artificial Sequence: Synthetic oligonucleotide
guugaacuauaacaccaacuccagc

SEQ ID NO: 2874 - RNA, 25 nt, Artificial Sequence
  Description of Artificial Sequence: Synthetic oligonucleotide
ccacgcucugcgccagcuccgcuug

SEQ ID NO: 2875 - RNA, 25 nt, Artificial Sequence
  Description of Artificial Sequence: Synthetic oligonucleotide
gacucagcucaccggucaguucccg

SEQ ID NO: 2876 - RNA, 25 nt, Artificial Sequence
  Description of Artificial Sequence: Synthetic oligonucleotide
gaugguuccuucuggccucaccccu

SEQ ID NO: 2877 - RNA, 25 nt, Artificial Sequence
  Description of Artificial Sequence: Synthetic oligonucleotide
ucagccagcccaagacugguaccuc

SEQ ID NO: 2878 - RNA, 25 nt, Artificial Sequence
  Description of Artificial Sequence: Synthetic oligonucleotide
ccuugaugaugacccaagacugcuc

SEQ ID NO: 2879 - RNA, 25 nt, Artificial Sequence
  Description of Artificial Sequence: Synthetic oligonucleotide
cacucuaagugccucuuccaaggug

SEQ ID NO: 2880 - RNA, 25 nt, Artificial Sequence
  Description of Artificial Sequence: Synthetic oligonucleotide
gccugucaccuuggccgcugucuaa

SEQ ID NO: 2881 - RNA, 25 nt, Artificial Sequence
  Description of Artificial Sequence: Synthetic oligonucleotide
aagguccauugcucccuaagcaaua

SEQ ID NO: 2882 - RNA, 25 nt, Artificial Sequence
  Description of Artificial Sequence: Synthetic oligonucleotide
agagggcccccaguagggggagcua

SEQ ID NO: 2883 - RNA, 25 nt, Artificial Sequence
  Description of Artificial Sequence: Synthetic oligonucleotide
aggggcaucugcuccagggaaagga

SEQ ID NO: 2884 - RNA, 25 nt, Artificial Sequence
  Description of Artificial Sequence: Synthetic oligonucleotide
aacccuguguccuuguggggcugga

SEQ ID NO: 2885 - RNA, 25 nt, Artificial Sequence
  Description of Artificial Sequence: Synthetic oligonucleotide
agucagagcuggaucuguuaaccgu

SEQ ID NO: 2886 - RNA, 25 nt, Artificial Sequence
  Description of Artificial Sequence: Synthetic oligonucleotide
uuuuucuaauuucaaaguacagugu

SEQ ID NO: 2887 - RNA, 25 nt, Artificial Sequence
  Description of Artificial Sequence: Synthetic oligonucleotide
uaccggaggccaggccugauggcuu

SEQ ID NO: 2888 - RNA, 25 nt, Artificial Sequence
  Description of Artificial Sequence: Synthetic oligonucleotide
uacaccuguaaucccagcauuuugg

SEQ ID NO: 2889 - RNA, 25 nt, Artificial Sequence
  Description of Artificial Sequence: Synthetic oligonucleotide
ggaggccaaggagggcagaucacuu

SEQ ID NO: 2890 - RNA, 25 nt, Artificial Sequence
  Description of Artificial Sequence: Synthetic oligonucleotide
ugagaucaggaguuugagaccagcc

SEQ ID NO: 2891 - RNA, 25 nt, Artificial Sequence
  Description of Artificial Sequence: Synthetic oligonucleotide
cuggccaacauggcgaaacccuguc

SEQ ID NO: 2892 - RNA, 25 nt, Artificial Sequence
  Description of Artificial Sequence: Synthetic oligonucleotide
cucuacuaaaaauacaaaaaaauaa

SEQ ID NO: 2893 - RNA, 25 nt, Artificial Sequence
  Description of Artificial Sequence: Synthetic oligonucleotide
aaaaauaaaauaaaauaaaaaauua

SEQ ID NO: 2894 - RNA, 25 nt, Artificial Sequence
  Description of Artificial Sequence: Synthetic oligonucleotide
gacucagcucaccgagauucuguca

SEQ ID NO: 2895 - RNA, 25 nt, Artificial Sequence
  Description of Artificial Sequence: Synthetic oligonucleotide
aggggguguuuauauugagaagaac

SEQ ID NO: 2896 - RNA, 25 nt, Artificial Sequence
  Description of Artificial Sequence: Synthetic oligonucleotide
cgauaagcuuugucacauggacaca

SEQ ID NO: 2897 - RNA, 25 nt, Artificial Sequence
  Description of Artificial Sequence: Synthetic oligonucleotide
aauugacuggagggacaucgugagg

SEQ ID NO: 2898 - RNA, 25 nt, Artificial Sequence
  Description of Artificial Sequence: Synthetic oligonucleotide
ggaccgagaugcugagauaguggug

SEQ ID NO: 2899 - RNA, 25 nt, Artificial Sequence
  Description of Artificial Sequence: Synthetic oligonucleotide
gaaggacaauggcagaagcuguccc

SEQ ID NO: 2900 - RNA, 25 nt, Artificial Sequence
  Description of Artificial Sequence: Synthetic oligonucleotide
ccccugucaugagguuugcaagggg

SEQ ID NO: 2901 - RNA, 25 nt, Artificial Sequence
  Description of Artificial Sequence: Synthetic oligonucleotide
gcgaugcugggguccuggaucagaa

SEQ ID NO: 2902 - RNA, 25 nt, Artificial Sequence
  Description of Artificial Sequence: Synthetic oligonucleotide
agacugccagacauugaccaagacc

SEQ ID NO: 2903 - RNA, 25 nt, Artificial Sequence
  Description of Artificial Sequence: Synthetic oligonucleotide
caucugugcuccucaguguaauggu

SEQ ID NO: 2904 - RNA, 25 nt, Artificial Sequence
  Description of Artificial Sequence: Synthetic oligonucleotide
ucacugcuuugggcccaaccccaac

SEQ ID NO: 2905 - RNA, 25 nt, Artificial Sequence
  Description of Artificial Sequence: Synthetic oligonucleotide
ccagugcugccaugaugagugugcc

SEQ ID NO: 2906 - RNA, 25 nt, Artificial Sequence
  Description of Artificial Sequence: Synthetic oligonucleotide
cgggggcugcucaggcccucaggac

SEQ ID NO: 2907 - RNA, 25 nt, Artificial Sequence
  Description of Artificial Sequence: Synthetic oligonucleotide
cacagacugcuuugccugccggcac

SEQ ID NO: 2908 - RNA, 25 nt, Artificial Sequence
  Description of Artificial Sequence: Synthetic oligonucleotide
cuucaaugacaguggagccugugua

SEQ ID NO: 2909 - RNA, 25 nt, Artificial Sequence
  Description of Artificial Sequence: Synthetic oligonucleotide
accucgcuguccacagccucuuguc

SEQ ID NO: 2910 - RNA, 25 nt, Artificial Sequence
  Description of Artificial Sequence: Synthetic oligonucleotide
cuacaacaagcuaacuuuccagcug

SEQ ID NO: 2911 - RNA, 25 nt, Artificial Sequence
  Description of Artificial Sequence: Synthetic oligonucleotide
ggaacccaauccccacaccaaguau

SEQ ID NO: 2912 - RNA, 25 nt, Artificial Sequence
  Description of Artificial Sequence: Synthetic oligonucleotide
ucaguauggaggaguuuguguagcc

SEQ ID NO: 2913 - RNA, 25 nt, Artificial Sequence
  Description of Artificial Sequence: Synthetic oligonucleotide
cagcuguccccauaacuuuguggug

SEQ ID NO: 2914 - RNA, 25 nt, Artificial Sequence
  Description of Artificial Sequence: Synthetic oligonucleotide
ggaucaaacauccugugucagggcc

SEQ ID NO: 2915 - RNA, 25 nt, Artificial Sequence
  Description of Artificial Sequence: Synthetic oligonucleotide
cuguccuccugacaagauggaagua

SEQ ID NO: 2916 - RNA, 25 nt, Artificial Sequence
  Description of Artificial Sequence: Synthetic oligonucleotide
agauaaaaaugggcucaagaugugu

SEQ ID NO: 2917 - RNA, 25 nt, Artificial Sequence
  Description of Artificial Sequence: Synthetic oligonucleotide
ugagccuugugggggacuauguccc

SEQ ID NO: 2918 - RNA, 25 nt, Artificial Sequence
  Description of Artificial Sequence: Synthetic oligonucleotide
caaagccugugagggaacaggcucu

SEQ ID NO: 2919 - RNA, 25 nt, Artificial Sequence
  Description of Artificial Sequence: Synthetic oligonucleotide
ugggagccgcuuccagacuguggac

SEQ ID NO: 2920 - RNA, 25 nt, Artificial Sequence
  Description of Artificial Sequence: Synthetic oligonucleotide
cucgagcaacauugauggauuugug

SEQ ID NO: 2921 - RNA, 25 nt, Artificial Sequence
  Description of Artificial Sequence: Synthetic oligonucleotide
gaacugcaccaagauccugggcaac

SEQ ID NO: 2922 - RNA, 25 nt, Artificial Sequence
  Description of Artificial Sequence: Synthetic oligonucleotide
ccuggacuuucugaucaccggccuc

SEQ ID NO: 2923 - RNA, 25 nt, Artificial Sequence
  Description of Artificial Sequence: Synthetic oligonucleotide
caauggagaccccuggcacaagauc

SEQ ID NO: 2924 - RNA, 25 nt, Artificial Sequence
  Description of Artificial Sequence: Synthetic oligonucleotide
cccugcccuggacccagagaagcuc

SEQ ID NO: 2925 - RNA, 25 nt, Artificial Sequence
  Description of Artificial Sequence: Synthetic oligonucleotide
caaugucuuccggacaguacgggag

SEQ ID NO: 2926 - RNA, 25 nt, Artificial Sequence
  Description of Artificial Sequence: Synthetic oligonucleotide
gaucacagguuaccugaacauccag

SEQ ID NO: 2927 - RNA, 25 nt, Artificial Sequence
  Description of Artificial Sequence: Synthetic oligonucleotide
guccuggccgccccacaugcacaac

SEQ ID NO: 2928 - RNA, 25 nt, Artificial Sequence
  Description of Artificial Sequence: Synthetic oligonucleotide
cuucaguguuuuuuccaauuugaca

SEQ ID NO: 2929 - RNA, 25 nt, Artificial Sequence
  Description of Artificial Sequence: Synthetic oligonucleotide
aaccauuggaggcagaagccucuac

SEQ ID NO: 2930 - RNA, 25 nt, Artificial Sequence
  Description of Artificial Sequence: Synthetic oligonucleotide
caaccggggcuucucauuguugauc

SEQ ID NO: 2931 - RNA, 25 nt, Artificial Sequence
  Description of Artificial Sequence: Synthetic oligonucleotide
caugaagaacuugaaugucacaucu

SEQ ID NO: 2932 - RNA, 25 nt, Artificial Sequence
  Description of Artificial Sequence: Synthetic oligonucleotide
ucugggcuuccgaucccugaaggaa

SEQ ID NO: 2933 - RNA, 25 nt, Artificial Sequence
  Description of Artificial Sequence: Synthetic oligonucleotide
aauuagugcugggcguaucuauaua

SEQ ID NO: 2934 - RNA, 25 nt, Artificial Sequence
  Description of Artificial Sequence: Synthetic oligonucleotide
aagugccaauaggcagcucugcuac

SEQ ID NO: 2935 - RNA, 25 nt, Artificial Sequence
  Description of Artificial Sequence: Synthetic oligonucleotide
ccaccacucuuugaacuggaccaag

SEQ ID NO: 2936 - RNA, 25 nt, Artificial Sequence
  Description of Artificial Sequence: Synthetic oligonucleotide
ggugcuucgggggccuacggaagag

SEQ ID NO: 2937 - RNA, 25 nt, Artificial Sequence
  Description of Artificial Sequence: Synthetic oligonucleotide
gcgacuagacaucaagcauaaucgg

SEQ ID NO: 2938 - RNA, 25 nt, Artificial Sequence
  Description of Artificial Sequence: Synthetic oligonucleotide
gccgcgcagagacugcguggcagag

SEQ ID NO: 2939 - RNA, 25 nt, Artificial Sequence
  Description of Artificial Sequence: Synthetic oligonucleotide
gggcaaagugugugacccacugugc

SEQ ID NO: 2940 - RNA, 25 nt, Artificial Sequence
  Description of Artificial Sequence: Synthetic oligonucleotide
cuccucugggggaugcuggggccca

SEQ ID NO: 2941 - RNA, 25 nt, Artificial Sequence
  Description of Artificial Sequence: Synthetic oligonucleotide
aggcccuggucagugcuuguccugu

SEQ ID NO: 2942 - RNA, 25 nt, Artificial Sequence
  Description of Artificial Sequence: Synthetic oligonucleotide
ucgaaauuauagccgaggagguguc

SEQ ID NO: 2943 - RNA, 25 nt, Artificial Sequence
  Description of Artificial Sequence: Synthetic oligonucleotide
cugugugacccacugcaacuuucug

SEQ ID NO: 2944 - RNA, 25 nt, Artificial Sequence
  Description of Artificial Sequence: Synthetic oligonucleotide
gaauggggagccucgagaauuugcc

SEQ ID NO: 2945 - RNA, 25 nt, Artificial Sequence
  Description of Artificial Sequence: Synthetic oligonucleotide
ccaugaggccgaaugcuucuccugc

SEQ ID NO: 2946 - RNA, 25 nt, Artificial Sequence
  Description of Artificial Sequence: Synthetic oligonucleotide
ccacccggaaugccaacccauggag

SEQ ID NO: 2947 - RNA, 25 nt, Artificial Sequence
  Description of Artificial Sequence: Synthetic oligonucleotide
gggcacugccacaugcaauggcucg

SEQ ID NO: 2948 - RNA, 25 nt, Artificial Sequence
  Description of Artificial Sequence: Synthetic oligonucleotide
gggcucugauacuugugcucaaugu

SEQ ID NO: 2949 - RNA, 25 nt, Artificial Sequence
  Description of Artificial Sequence: Synthetic oligonucleotide
ugcccauuuucgagaugggccccac

SEQ ID NO: 2950 - RNA, 25 nt, Artificial Sequence
  Description of Artificial Sequence: Synthetic oligonucleotide
cugugugagcagcugcccccaugga

SEQ ID NO: 2951 - RNA, 25 nt, Artificial Sequence
  Description of Artificial Sequence: Synthetic oligonucleotide
aguccuaggugccaagggcccaauc

SEQ ID NO: 2952 - RNA, 25 nt, Artificial Sequence
  Description of Artificial Sequence: Synthetic oligonucleotide
cuacaaguacccagauguucagaau

SEQ ID NO: 2953 - RNA, 25 nt, Artificial Sequence
  Description of Artificial Sequence: Synthetic oligonucleotide
ugaaugucggcccugccaugagaac

SEQ ID NO: 2954 - RNA, 25 nt, Artificial Sequence
  Description of Artificial Sequence: Synthetic oligonucleotide
cugcacccagggguguaaaggacca

SEQ ID NO: 2955 - RNA, 25 nt, Artificial Sequence
  Description of Artificial Sequence: Synthetic oligonucleotide
agagcuucaagacuguuuaggacaa

SEQ ID NO: 2956 - RNA, 25 nt, Artificial Sequence
  Description of Artificial Sequence: Synthetic oligonucleotide
aacacuggugcugaucggcaaaacc

SEQ ID NO: 2957 - RNA, 25 nt, Artificial Sequence
  Description of Artificial Sequence: Synthetic oligonucleotide
ccaucugacaauggcuuugacagug

SEQ ID NO: 2958 - RNA, 25 nt, Artificial Sequence
  Description of Artificial Sequence: Synthetic oligonucleotide
gauagcaggauugguagugauuuuc

SEQ ID NO: 2959 - RNA, 25 nt, Artificial Sequence
  Description of Artificial Sequence: Synthetic oligonucleotide
caugaugcugggcggcacuuuucuc

SEQ ID NO: 2960 - RNA, 25 nt, Artificial Sequence
  Description of Artificial Sequence: Synthetic oligonucleotide
cuacuggcgugggcgccggauucag

SEQ ID NO: 2961 - RNA, 25 nt, Artificial Sequence
  Description of Artificial Sequence: Synthetic oligonucleotide
gaauaaaagggcuaugaggcgauac

SEQ ID NO: 2962 - RNA, 25 nt, Artificial Sequence
  Description of Artificial Sequence: Synthetic oligonucleotide
cuuggaacggggugagagcauagag

SEQ ID NO: 2963 - RNA, 25 nt, Artificial Sequence
  Description of Artificial Sequence: Synthetic oligonucleotide
gccucuggaccccagugagaaggcu

SEQ ID NO: 2964 - RNA, 25 nt, Artificial Sequence
  Description of Artificial Sequence: Synthetic oligonucleotide
uaacaaagucuuggccagaaucuuc

SEQ ID NO: 2965 - RNA, 25 nt, Artificial Sequence
  Description of Artificial Sequence: Synthetic oligonucleotide
caaagagacagagcuaaggaagcuu

SEQ ID NO: 2966 - RNA, 25 nt, Artificial Sequence
  Description of Artificial Sequence: Synthetic oligonucleotide
uaaagugcuuggcucgggugucuuu

SEQ ID NO: 2967 - RNA, 25 nt, Artificial Sequence
  Description of Artificial Sequence: Synthetic oligonucleotide
uggaacugugcacaaaggagugugg

SEQ ID NO: 2968 - RNA, 25 nt, Artificial Sequence
  Description of Artificial Sequence: Synthetic oligonucleotide
gaucccugagggugaaucaaucaag

SEQ ID NO: 2969 - RNA, 25 nt, Artificial Sequence
  Description of Artificial Sequence: Synthetic oligonucleotide
gauuccagucugcauuaaagucauu

SEQ ID NO: 2970 - RNA, 25 nt, Artificial Sequence
  Description of Artificial Sequence: Synthetic oligonucleotide
ugaggacaagaguggacggcagagu

SEQ ID NO: 2971 - RNA, 25 nt, Artificial Sequence
  Description of Artificial Sequence: Synthetic oligonucleotide
uuuucaagcugugacagaucauaug

SEQ ID NO: 2972 - RNA, 25 nt, Artificial Sequence
  Description of Artificial Sequence: Synthetic oligonucleotide
gcuggccauuggcagccuggaccau

SEQ ID NO: 2973 - RNA, 25 nt, Artificial Sequence
  Description of Artificial Sequence: Synthetic oligonucleotide
ugcccacauuguaaggcugcuggga

SEQ ID NO: 2974 - RNA, 25 nt, Artificial Sequence
  Description of Artificial Sequence: Synthetic oligonucleotide
acuaugcccagggucaucucugcag

SEQ ID NO: 2975 - RNA, 25 nt, Artificial Sequence
  Description of Artificial Sequence: Synthetic oligonucleotide
gcuugucacucaauauuugccucug

SEQ ID NO: 2976 - RNA, 25 nt, Artificial Sequence
  Description of Artificial Sequence: Synthetic oligonucleotide
ggguucucugcuggaucaugugaga

SEQ ID NO: 2977 - RNA, 25 nt, Artificial Sequence
  Description of Artificial Sequence: Synthetic oligonucleotide
acaacaccggggggcacuggggcca

SEQ ID NO: 2978 - RNA, 25 nt, Artificial Sequence
  Description of Artificial Sequence: Synthetic oligonucleotide
acagcugcugcucaacuggggagua

SEQ ID NO: 2979 - RNA, 25 nt, Artificial Sequence
  Description of Artificial Sequence: Synthetic oligonucleotide
acaaauugccaagggaauguacuac

SEQ ID NO: 2980 - RNA, 25 nt, Artificial Sequence
  Description of Artificial Sequence: Synthetic oligonucleotide
ccuugaggaacaugguauggugcau

SEQ ID NO: 2981 - RNA, 25 nt, Artificial Sequence
  Description of Artificial Sequence: Synthetic oligonucleotide
uagaaaccuggcugcccgaaacgug

SEQ ID NO: 2982 - RNA, 25 nt, Artificial Sequence
  Description of Artificial Sequence: Synthetic oligonucleotide
gcuacucaagucacccagucagguu

SEQ ID NO: 2983 - RNA, 25 nt, Artificial Sequence
  Description of Artificial Sequence: Synthetic oligonucleotide
ucagguggcagauuuugguguggcu

SEQ ID NO: 2984 - RNA, 25 nt, Artificial Sequence
  Description of Artificial Sequence: Synthetic oligonucleotide
ugaccugcugccuccugaugauaag

SEQ ID NO: 2985 - RNA, 25 nt, Artificial Sequence
  Description of Artificial Sequence: Synthetic oligonucleotide
gcagcugcuauacagugaggccaag

SEQ ID NO: 2986 - RNA, 25 nt, Artificial Sequence
  Description of Artificial Sequence: Synthetic oligonucleotide
gacuccaauuaaguggauggcccuu

SEQ ID NO: 2987 - RNA, 25 nt, Artificial Sequence
  Description of Artificial Sequence: Synthetic oligonucleotide
ugagaguauccacuuugggaaauac

SEQ ID NO: 2988 - RNA, 25 nt, Artificial Sequence
  Description of Artificial Sequence: Synthetic oligonucleotide
cacacaccagagugaugucuggagc

SEQ ID NO: 2989 - RNA, 25 nt, Artificial Sequence
  Description of Artificial Sequence: Synthetic oligonucleotide
cuauggugugacaguuugggaguug

SEQ ID NO: 2990 - RNA, 25 nt, Artificial Sequence
  Description of Artificial Sequence: Synthetic oligonucleotide
gaugaccuucggggcagagcccuau

SEQ ID NO: 2991 - RNA, 25 nt, Artificial Sequence
  Description of Artificial Sequence: Synthetic oligonucleotide
ugcagggcuacgauuggcugaagua

SEQ ID NO: 2992 - RNA, 25 nt, Artificial Sequence
  Description of Artificial Sequence: Synthetic oligonucleotide
accagaccugcuagagaagggggag

SEQ ID NO: 2993 - RNA, 25 nt, Artificial Sequence
  Description of Artificial Sequence: Synthetic oligonucleotide
gcgguuggcacagccccagaucugc

SEQ ID NO: 2994 - RNA, 25 nt, Artificial Sequence
  Description of Artificial Sequence: Synthetic oligonucleotide
cacaauugaugucuacauggugaug

SEQ ID NO: 2995 - RNA, 25 nt, Artificial Sequence
  Description of Artificial Sequence: Synthetic oligonucleotide
ggucaaguguuggaugauugaugag

SEQ ID NO: 2996 - RNA, 25 nt, Artificial Sequence
  Description of Artificial Sequence: Synthetic oligonucleotide
gaacauucgcccaaccuuuaaagaa

SEQ ID NO: 2997 - RNA, 25 nt, Artificial Sequence
  Description of Artificial Sequence: Synthetic oligonucleotide
acuagccaaugaguucaccaggaug

SEQ ID NO: 2998 - RNA, 25 nt, Artificial Sequence
  Description of Artificial Sequence: Synthetic oligonucleotide
ggcccgagacccaccacgguaucug

SEQ ID NO: 2999 - RNA, 25 nt, Artificial Sequence
  Description of Artificial Sequence: Synthetic oligonucleotide
ggucauaaagagagagagugggccu

SEQ ID NO: 3000 - RNA, 25 nt, Artificial Sequence
  Description of Artificial Sequence: Synthetic oligonucleotide
uggaauagccccugggccagagccc

SEQ ID NO: 3001 - RNA, 25 nt, Artificial Sequence
  Description of Artificial Sequence: Synthetic oligonucleotide
ccauggucugacaaacaagaagcua

SEQ ID NO: 3002 - RNA, 25 nt, Artificial Sequence
  Description of Artificial Sequence: Synthetic oligonucleotide
agaggaaguagagcuggagccagaa

SEQ ID NO: 3003 - RNA, 25 nt, Artificial Sequence
  Description of Artificial Sequence: Synthetic oligonucleotide
acuagaccuagaccuagacuuggaa

SEQ ID NO: 3004 - RNA, 25 nt, Artificial Sequence
  Description of Artificial Sequence: Synthetic oligonucleotide
agcagaggaggacaaccuggcaacc

SEQ ID NO: 3005 - RNA, 25 nt, Artificial Sequence
  Description of Artificial Sequence: Synthetic oligonucleotide
caccacacugggcuccgcccucagc

SEQ ID NO: 3006 - RNA, 25 nt, Artificial Sequence
  Description of Artificial Sequence: Synthetic oligonucleotide
ccuaccaguuggaacacuuaaucgg

SEQ ID NO: 3007 - RNA, 25 nt, Artificial Sequence
  Description of Artificial Sequence: Synthetic oligonucleotide
gccacgugggagccagagccuuuua

SEQ ID NO: 3008 - RNA, 25 nt, Artificial Sequence
  Description of Artificial Sequence: Synthetic oligonucleotide
aaguccaucaucuggauacaugccc

SEQ ID NO: 3009 - RNA, 25 nt, Artificial Sequence
  Description of Artificial Sequence: Synthetic oligonucleotide
caugaaccaggguaaucuuggggag

SEQ ID NO: 3010 - RNA, 25 nt, Artificial Sequence
  Description of Artificial Sequence: Synthetic oligonucleotide
gucuugccaggagucugcaguuucu

SEQ ID NO: 3011 - RNA, 25 nt, Artificial Sequence
  Description of Artificial Sequence: Synthetic oligonucleotide
ugggagcagugaacggugcccccgu

SEQ ID NO: 3012 - RNA, 25 nt, Artificial Sequence
  Description of Artificial Sequence: Synthetic oligonucleotide
uccagucucucuacacccaaugcca

SEQ ID NO: 3013 - RNA, 25 nt, Artificial Sequence
  Description of Artificial Sequence: Synthetic oligonucleotide
acggggaugccuggcaucagaguca

SEQ ID NO: 3014 - RNA, 25 nt, Artificial Sequence
  Description of Artificial Sequence: Synthetic oligonucleotide
aucagaggggcauguaacaggcucu

SEQ ID NO: 3015 - RNA, 25 nt, Artificial Sequence
  Description of Artificial Sequence: Synthetic oligonucleotide
ugaggcugagcuccaggagaaagug

SEQ ID NO: 3016 - RNA, 25 nt, Artificial Sequence
  Description of Artificial Sequence: Synthetic oligonucleotide
gucaauguguaggagccggagcagg

SEQ ID NO: 3017 - RNA, 25 nt, Artificial Sequence
  Description of Artificial Sequence: Synthetic oligonucleotide
gagccggagcccacggccacgcgga

SEQ ID NO: 3018 - RNA, 25 nt, Artificial Sequence
  Description of Artificial Sequence: Synthetic oligonucleotide
agauagcgccuaccauucccagcgc

SEQ ID NO: 3019 - RNA, 25 nt, Artificial Sequence
  Description of Artificial Sequence: Synthetic oligonucleotide
ccacagucugcugacuccuguuacc

SEQ ID NO: 3020 - RNA, 25 nt, Artificial Sequence
  Description of Artificial Sequence: Synthetic oligonucleotide
cccacucuccccacccggguuagag

SEQ ID NO: 3021 - RNA, 25 nt, Artificial Sequence
  Description of Artificial Sequence: Synthetic oligonucleotide
ggaagaggaugucaacgguuauguc

SEQ ID NO: 3022 - RNA, 25 nt, Artificial Sequence
  Description of Artificial Sequence: Synthetic oligonucleotide
caugccagauacacaccucaaaggu

SEQ ID NO: 3023 - RNA, 25 nt, Artificial Sequence
  Description of Artificial Sequence: Synthetic oligonucleotide
uacucccuccucccgggaaggcacc

SEQ ID NO: 3024 - RNA, 25 nt, Artificial Sequence
  Description of Artificial Sequence: Synthetic oligonucleotide
ccuuucuucagugggucucaguucu

SEQ ID NO: 3025 - RNA, 25 nt, Artificial Sequence
  Description of Artificial Sequence: Synthetic oligonucleotide
uguccuggguacugaagaagaagau

SEQ ID NO: 3026 - RNA, 25 nt, Artificial Sequence
  Description of Artificial Sequence: Synthetic oligonucleotide
ugaagaugaggaguaugaauacaug

SEQ ID NO: 3027 - RNA, 25 nt, Artificial Sequence
  Description of Artificial Sequence: Synthetic oligonucleotide
gaaccggaggagaaggcacagucca

SEQ ID NO: 3028 - RNA, 25 nt, Artificial Sequence
  Description of Artificial Sequence: Synthetic oligonucleotide
accucaucccccuaggccaaguucc

SEQ ID NO: 3029 - RNA, 25 nt, Artificial Sequence
  Description of Artificial Sequence: Synthetic oligonucleotide
ccuugaggagcuggguuaugaguac

SEQ ID NO: 3030 - RNA, 25 nt, Artificial Sequence
  Description of Artificial Sequence: Synthetic oligonucleotide
cauggauguggggucagaccucagu

SEQ ID NO: 3031 - RNA, 25 nt, Artificial Sequence
  Description of Artificial Sequence: Synthetic oligonucleotide
ugccucucugggcagcacacagagu

SEQ ID NO: 3032 - RNA, 25 nt, Artificial Sequence
  Description of Artificial Sequence: Synthetic oligonucleotide
uugcccacuccacccuguacccauc

SEQ ID NO: 3033 - RNA, 25 nt, Artificial Sequence
  Description of Artificial Sequence: Synthetic oligonucleotide
caugcccacugcaggcacaacucca

SEQ ID NO: 3034 - RNA, 25 nt, Artificial Sequence
  Description of Artificial Sequence: Synthetic oligonucleotide
agaugaagacuaugaauauaugaau

SEQ ID NO: 3035 - RNA, 25 nt, Artificial Sequence
  Description of Artificial Sequence: Synthetic oligonucleotide
ucggcaacgagauggaggugguccu

SEQ ID NO: 3036 - RNA, 25 nt, Artificial Sequence
  Description of Artificial Sequence: Synthetic oligonucleotide
ugggggugauuaugcagccaugggg

SEQ ID NO: 3037 - RNA, 25 nt, Artificial Sequence
  Description of Artificial Sequence: Synthetic oligonucleotide
ggccugcccagcaucugagcaaggg

SEQ ID NO: 3038 - RNA, 25 nt, Artificial Sequence
  Description of Artificial Sequence: Synthetic oligonucleotide
guaugaagagaugagagcuuuucag

SEQ ID NO: 3039 - RNA, 25 nt, Artificial Sequence
  Description of Artificial Sequence: Synthetic oligonucleotide
ggggccuggacaucaggccccccau

SEQ ID NO: 3040 - RNA, 25 nt, Artificial Sequence
  Description of Artificial Sequence: Synthetic oligonucleotide
uguccauuaugcccgccuaaaaacu

SEQ ID NO: 3041 - RNA, 25 nt, Artificial Sequence
  Description of Artificial Sequence: Synthetic oligonucleotide
ucuacguagcuuagaggcuacagac

SEQ ID NO: 3042 - RNA, 25 nt, Artificial Sequence
  Description of Artificial Sequence: Synthetic oligonucleotide
cucugccuuugauaacccugauuac

SEQ ID NO: 3043 - RNA, 25 nt, Artificial Sequence
  Description of Artificial Sequence: Synthetic oligonucleotide
cuggcauagcaggcuuuuccccaag

SEQ ID NO: 3044 - RNA, 25 nt, Artificial Sequence
  Description of Artificial Sequence: Synthetic oligonucleotide
ggcuaaugcccagagaacguaacuc

SEQ ID NO: 3045 - RNA, 25 nt, Artificial Sequence
  Description of Artificial Sequence: Synthetic oligonucleotide
ccugcucccuguggcacucagggag

SEQ ID NO: 3046 - RNA, 25 nt, Artificial Sequence
  Description of Artificial Sequence: Synthetic oligonucleotide
gcauuuaauggcagcuagugccuuu

SEQ ID NO: 3047 - RNA, 25 nt, Artificial Sequence
  Description of Artificial Sequence: Synthetic oligonucleotide
uagaggguaccgucuucucccuauu

SEQ ID NO: 3048 - RNA, 25 nt, Artificial Sequence
  Description of Artificial Sequence: Synthetic oligonucleotide
ucccucucucucccaggucccagcc

SEQ ID NO: 3049 - RNA, 25 nt, Artificial Sequence
  Description of Artificial Sequence: Synthetic oligonucleotide
cccuuuuccccagucccagacaauu

SEQ ID NO: 3050 - RNA, 25 nt, Artificial Sequence
  Description of Artificial Sequence: Synthetic oligonucleotide
uccauucaaucuuuggaggcuuuua

SEQ ID NO: 3051 - RNA, 25 nt, Artificial Sequence
  Description of Artificial Sequence: Synthetic oligonucleotide
aaacauuuugacacaaaauucuuau

SEQ ID NO: 3052 - RNA, 25 nt, Artificial Sequence
  Description of Artificial Sequence: Synthetic oligonucleotide
ugguauguagccagcugugcacuuu

SEQ ID NO: 3053 - RNA, 25 nt, Artificial Sequence
  Description of Artificial Sequence: Synthetic oligonucleotide
ucuucucuuucccaaccccaggaaa

SEQ ID NO: 3054 - RNA, 25 nt, Artificial Sequence
  Description of Artificial Sequence: Synthetic oligonucleotide
agguuuuccuuauuuugugugcuuu

SEQ ID NO: 3055 - RNA, 25 nt, Artificial Sequence
  Description of Artificial Sequence: Synthetic oligonucleotide
ucccagucccauuccucagcuucuu

SEQ ID NO: 3056 - RNA, 25 nt, Artificial Sequence
  Description of Artificial Sequence: Synthetic oligonucleotide
ucacaggcacuccuggagauaugaa

SEQ ID NO: 3057 - RNA, 25 nt, Artificial Sequence
  Description of Artificial Sequence: Synthetic oligonucleotide
aggauuacucuccauaucccuuccu

SEQ ID NO: 3058 - RNA, 25 nt, Artificial Sequence
  Description of Artificial Sequence: Synthetic oligonucleotide
ucucaggcucuugacuacuuggaac

SEQ ID NO: 3059 - RNA, 25 nt, Artificial Sequence
  Description of Artificial Sequence: Synthetic oligonucleotide
cuaggcucuuaugugugccuuuguu

SEQ ID NO: 3060 - RNA, 25 nt, Artificial Sequence
  Description of Artificial Sequence: Synthetic oligonucleotide
uucccaucagacugucaagaagagg

SEQ ID NO: 3061 - RNA, 25 nt, Artificial Sequence
  Description of Artificial Sequence: Synthetic oligonucleotide
gaaagggaggaaaccuagcagagga

SEQ ID NO: 3062 - RNA, 25 nt, Artificial Sequence
  Description of Artificial Sequence: Synthetic oligonucleotide
aaaguguaauuuugguuuaugacuc

SEQ ID NO: 3063 - RNA, 25 nt, Artificial Sequence
  Description of Artificial Sequence: Synthetic oligonucleotide
cuuaacccccuagaaagacagaagc

SEQ ID NO: 3064 - RNA, 25 nt, Artificial Sequence
  Description of Artificial Sequence: Synthetic oligonucleotide
cuuaaaaucugugaagaaagagguu

SEQ ID NO: 3065 - RNA, 25 nt, Artificial Sequence
  Description of Artificial Sequence: Synthetic oligonucleotide
uaggaguagauauugauuacuauca

SEQ ID NO: 3066 - RNA, 25 nt, Artificial Sequence
  Description of Artificial Sequence: Synthetic oligonucleotide
auaauucagcacuuaacuaugagcc

SEQ ID NO: 3067 - RNA, 25 nt, Artificial Sequence
  Description of Artificial Sequence: Synthetic oligonucleotide
caggcaucauacuaaacuucaccua

SEQ ID NO: 3068 - RNA, 25 nt, Artificial Sequence
  Description of Artificial Sequence: Synthetic oligonucleotide
acauuaucucacuuaguccuuuauc

SEQ ID NO: 3069 - RNA, 25 nt, Artificial Sequence
  Description of Artificial Sequence: Synthetic oligonucleotide
cauccuuaaaacaauucugugacau

SEQ ID NO: 3070 - RNA, 25 nt, Artificial Sequence
  Description of Artificial Sequence: Synthetic oligonucleotide
uacauauuaucucauuuuacacaaa

SEQ ID NO: 3071 - RNA, 25 nt, Artificial Sequence
  Description of Artificial Sequence: Synthetic oligonucleotide
agggaagucgggcaugguggcucau

SEQ ID NO: 3072 - RNA, 25 nt, Artificial Sequence
  Description of Artificial Sequence: Synthetic oligonucleotide
ugccuguaaucucagcacuuuggga

SEQ ID NO: 3073 - RNA, 25 nt, Artificial Sequence
  Description of Artificial Sequence: Synthetic oligonucleotide
aggcugaggcagaaggauuaccuga

SEQ ID NO: 3074 - RNA, 25 nt, Artificial Sequence
  Description of Artificial Sequence: Synthetic oligonucleotide
aggcaaggaguuugagaccagcuua

SEQ ID NO: 3075 - RNA, 25 nt, Artificial Sequence
  Description of Artificial Sequence: Synthetic oligonucleotide
agccaacauaguaagacccccaucu

SEQ ID NO: 3076 - RNA, 25 nt, Artificial Sequence
  Description of Artificial Sequence: Synthetic oligonucleotide
aaaaaaaaacuuuagaacugggugc

SEQ ID NO: 3077 - RNA, 25 nt, Artificial Sequence
  Description of Artificial Sequence: Synthetic oligonucleotide
caguggcucaugccuguaaucccag

SEQ ID NO: 3078 - RNA, 25 nt, Artificial Sequence
  Description of Artificial Sequence: Synthetic oligonucleotide
gccagcacuuugggaggcugagaug

SEQ ID NO: 3079 - RNA, 25 nt, Artificial Sequence
  Description of Artificial Sequence: Synthetic oligonucleotide
gggaagaucacuugagcccagaauu

SEQ ID NO: 3080 - RNA, 25 nt, Artificial Sequence
  Description of Artificial Sequence: Synthetic oligonucleotide
uagagauaagccuauggaaacauag

SEQ ID NO: 3081 - RNA, 25 nt, Artificial Sequence
  Description of Artificial Sequence: Synthetic oligonucleotide
gcaagacacugucucuacaggggaa

SEQ ID NO: 3082 - RNA, 25 nt, Artificial Sequence
  Description of Artificial Sequence: Synthetic oligonucleotide
aaagagaugaaauaaauuaagcagu

SEQ ID NO: 3083 - RNA, 25 nt, Artificial Sequence
  Description of Artificial Sequence: Synthetic oligonucleotide
uagauccaggaugcaaaauccuccc

SEQ ID NO: 3084 - RNA, 25 nt, Artificial Sequence
  Description of Artificial Sequence: Synthetic oligonucleotide
caauuccugugcaugugcucuuauu

SEQ ID NO: 3085 - RNA, 25 nt, Artificial Sequence
  Description of Artificial Sequence: Synthetic oligonucleotide
uguaaggugccaagaaaaacugauu

SEQ ID NO: 3086 - RNA, 25 nt, Artificial Sequence
  Description of Artificial Sequence: Synthetic oligonucleotide
uuaaguuacagcccuuguuuaaggg

SEQ ID NO: 3087 - RNA, 25 nt, Artificial Sequence
  Description of Artificial Sequence: Synthetic oligonucleotide
ggcacuguuucuuguuuuugcacug

SEQ ID NO: 3088 - RNA, 25 nt, Artificial Sequence
  Description of Artificial Sequence: Synthetic oligonucleotide
gaaucaagucuaaccccaacagcca

SEQ ID NO: 3089 - RNA, 25 nt, Artificial Sequence
  Description of Artificial Sequence: Synthetic oligonucleotide
acauccuccuauaccuagacaucuc

SEQ ID NO: 3090 - RNA, 25 nt, Artificial Sequence
  Description of Artificial Sequence: Synthetic oligonucleotide
caucucaggaagugguggugggggu

SEQ ID NO: 3091 - RNA, 25 nt, Artificial Sequence
  Description of Artificial Sequence: Synthetic oligonucleotide
uagucagaaggaaaaauaacuggac

SEQ ID NO: 3092 - RNA, 25 nt, Artificial Sequence
  Description of Artificial Sequence: Synthetic oligonucleotide
caucuuuguguaaaccauaauccac

SEQ ID NO: 3093 - RNA, 25 nt, Artificial Sequence
  Description of Artificial Sequence: Synthetic oligonucleotide
caugugccguaaaugaucuucacuc

SEQ ID NO: 3094 - RNA, 25 nt, Artificial Sequence
  Description of Artificial Sequence: Synthetic oligonucleotide
ccuuauccgagggcaaauucacaag

SEQ ID NO: 3095 - RNA, 25 nt, Artificial Sequence
  Description of Artificial Sequence: Synthetic oligonucleotide
ggauccccaagauccacuuuuagaa

SEQ ID NO: 3096 - RNA, 25 nt, Artificial Sequence
  Description of Artificial Sequence: Synthetic oligonucleotide
cacuuuuagaagccauucucaucca

SEQ ID NO: 3097 - RNA, 11941 nt, Homo sapiens
cacgcgcgcccggcugggggaucuccuccgcgugcccgaaagggggauaugccauuuggacauguaauugucagcacgggaucugagacuuccaaaaaaugaagccggcgacaggacuuugggucugggugagccuucucguggcggcggggaccguccagcccagcgauucucagucagugugugcaggaacggagaauaaacugagcucucucucugaccuggaacagcaguaccgagccuugcgcaaguacuaugaaaacugugagguugucaugggcaaccuggagauaaccagcauugagcacaaccgggaccucuccuuccugcggucuguucgagaagucacaggcuacguguuaguggcucuuaaucaguuucguuaccugccucuggagaauuuacgcauuauucgugggacaaaacuuuaugaggaucgauaugccuuggcaauauuuuuaaacuacagaaaagauggaaacuuuggacuucaagaacuuggauuaaagaacuugacagaaauccuaaaugguggagucuauguagaccagaacaaauuccuuuguuaugcagacaccauucauuggcaagauauuguucggaacccauggccuuccaacuugacucuugugucaacaaaugguaguucaggauguggacguugccauaaguccuguacuggccguugcuggggacccacagaaaaucauugccagacuuugacaaggacggugugugcagaacaaugugacggcagaugcuacggaccuuacgucagugacugcugccaucgagaaugugcuggaggcugcucaggaccuaaggacacagacugcuuugccugcaugaauuucaaugacaguggagcauguguuacucaguguccccaaaccuuugucuacaauccaaccaccuuucaacuggagcacaauuucaaugcaaaguacacauauggagcauucugugucaagaaauguccacauaacuuugugguagauuccaguucuugugugcgugccugcccuaguuccaagauggaaguagaagaaaaugggauuaaaauguguaaaccuugcacugacauuugcccaaaagcuugugauggcauuggcacaggaucauugaugucagcucagacuguggauuccaguaacauugacaaauucauaaacuguaccaagaucaaugggaauuugaucuuucuagucacugguauucauggggacccuuacaaugcaauugaagccauagacccagagaaacugaacgucuuucggacagucagagagauaacagguuuccugaacauacagucauggccaccaaacaugacugacuucaguguuuuuucuaaccuggugaccauugguggaagaguacucuauaguggccuguccuugcuuauccucaagcaacagggcaucaccucucuacaguuccagucccugaaggaaaucagcgcaggaaacaucuauauuacugacaacagcaaccuguguuauuaucauaccauuaacuggacaacacucuucagcacaaucaaccagagaauaguaauccgggacaacagaaaagcugaaaauuguacugcugaaggaauggugugcaaccaucuguguuccagugauggcuguuggggaccugggccagaccaaugucugucgugucgccgcuucaguagaggaaggaucugcauagagucuuguaaccucuaugauggugaauuucgggaguuugagaauggcuccaucuguguggagugugacccccagugugagaagauggaagauggccuccucacaugccauggaccggguccugacaacuguacaaagugcucucauuuuaaagauggcccaaacuguguggaaaaauguccagauggcuuacagggggcaaacaguuucauuuucaaguaugcugauccagaucgggagugccacccaugccauccaaacugcacccaaggguguaacggucccacuagucaugacugcauuuacuacccauggacgggccauuccacuuuaccacaacaugcuagaacuccccugauugcagcuggaguaauuggugggcucuucauucuggucauugugggucugacauuugcuguuuauguuagaaggaagagcaucaaaaagaaaagagccuugagaagauucuuggaaacagaguugguggaaccauuaacucccaguggcacagcacccaaucaagcucaacuucguauuuugaaagaaacugagcugaagaggguaaaaguccuuggcucaggugcuuuuggaacgguuuauaaagguauuuggguaccugaaggagaaacugugaagauuccuguggcuauuaagauucuuaaugagacaacuggucccaaggcaaauguggaguucauggaugaagcucugaucauggcaaguauggaucauccacaccuaguccgguugcugggugugugucugagcccaaccauccagcugguuacucaacuuaugccccauggcugccuguuggaguauguccacgagcacaaggauaacauuggaucacaacugcugcuuaacugguguguccagauagcuaagggaaugauguaccuggaagaaagacgacucguucaucgggauuuggcagcccguaaugucuuagugaaaucuccaaaccaugugaaaaucacagauuuugggcuagccagacucuuggaaggagaugaaaaagaguacaaugcugauggaggaaagaugccaauuaaauggauggcucuggaguguauacauuacaggaaauucacccaucagagugacguuuggagcuauggaguuacuauaugggaacugaugaccuuuggaggaaaacccuaugauggaauuccaacgcgagaaaucccugauuuauuagagaaaggagaacguuugccucagccucccaucugcacuauugacguuuacauggucauggucaaauguuggaugauugaugcugacaguagaccuaaauuuaaggaacuggcugcugaguuuucaaggauggcucgagacccucaaagauaccuaguuauucagggugaugaucguaugaagcuucccaguccaaaugacagcaaguucuuucagaaucucuuggaugaagaggauuuggaagauaugauggaugcugaggaguacuuggucccucaggcuuucaacaucccaccucccaucuauacuuccagagcaagaauugacucgaauaggagugaaauuggacacagcccuccuccugccuacacccccaugucaggaaaccaguuuguauaccgagauggagguuuugcugcugaacaaggagugucugugcccuacagagccccaacuagcacaauuccagaagcuccuguggcacagggugcuacugcugagauuuuugaugacuccugcuguaauggcacccuacgcaagccaguggcaccccauguccaagaggacaguagcacccagagguacagugcugaccccaccguguuugccccagaacggagcccacgaggagagcuggaugaggaagguuacaugacuccuaugcgagacaaacccaaacaagaauaccugaauccaguggaggagaacccuuuuguuucucggagaaaaaauggagaccuucaagcauuggauaaucccgaauaucacaaugcauccaaugguccacccaaggccgaggaugaguaugugaaugagccacuguaccucaacaccuuugccaacaccuugggaaaagcugaguaccugaagaacaacauacugucaaugccagagaaggccaagaaagcguuugacaacccugacuacuggaaccacagccugccaccucggagcacccuucagcacccagacuaccugcaggaguacagcacaaaauauuuuuauaaacagaaugggcggauccggccuauuguggcagagaauccugaauaccucucugaguucucccugaagccaggcacugugcugccgccuccaccuuacagacaccggaauacugugguguaagcucaguugugguuuuuuagguggagagacacaccugcuccaauuuccccaccccccucucuuucucugguggucuuccuucuaccccaaggccaguaguuuugacacuucccaguggaagauacagagaugcaaugauaguuaugugcuuaccuaacuugaacauuagagggaaagacugaaagagaaagauaggaggaaccacaauguuucuucauuucucugcauggguuggucaggagaaugaaacagcuagagaaggaccagaaaauguaaggcaaugcugccuacuaucaaacuagcugucacuuuuuuucuuuuucuuuuucuuucuuuguuucuuucuuccucuucuuuuuuuuuuuuuuuuuuaaagcagaugguugaaacacccaugcuaucuguuccuaucugcaggaacugaugugugcauauuuagcaucccuggaaaucauaauaaaguuuccauuagaacaaaagaauaacauuuucuauaacauaugauggugucugaaauugagaauccaguuucuuuccccagcaguuucuguccuagcaaguaagaauggccaacucaacuuucauaauuuaaaaaucuccauuaaaguuauaacuaguaauuauguuuucaacacuuuuugguuuuuuucauuuuguuuugcucugaccgauuccuuuauauuugcuccccuauuuuuggcuuuaauuucuaauugcaaagauguuuacaucaaagcuucuucacagaauuuaagcaagaaauauuuuaauauagugaaauggccacuacuuuaaguauacaaucuuuaaaauaagaaagggaggcuaauauuuuucaugcuaucaaauuaucuucacccucauccuuuacauuuuucaacauuuuuuuuucuccauaaaugacacuacuugauaggccguugguugucugaagaguagaagggaaacuaagagacaguucucugugguucaggaaaacuacugauacuuucagggguggcccaaugagggaauccauugaacuggaagaaacacacuggauuggguaugucuaccuggcagauacucagaaauguaguuugcacuuaagcuguaauuuuauuuguucuuuuucugaacuccauuuuggauuuugaaucaagcaauauggaagcaaccagcaaauuaacuaauuuaaguacauuuuuaaaaaaagagcuaagauaaagacuguggaaaugccaaaccaagcaaauuaggaaccuugcaacgguauccagggacuaugaugagaggccagcacauuaucuucauaugucaccuuugcuacgcaaggaaauuuguucaguucguauacuucguaagaaggaaugcgaguaaggauuggcuugaauuccauggaauuucuaguaugagacuauuuauaugaaguagaagguaacucuuugcacauaaauugguauaauaaaaagaaaaacacaaacauucaaagcuuagggauagguccuugggucaaaaguuguaaauaaaugugaaacaucuucucaugcaauuauuuuauuauccaacacacuaaucuuuugauacuuuauauaauucccuuucuucauauacugcauccaguacuagaaccaucauuauuauguaucauuuugaaagaauaccugaugagaugaaggaugagaacaaaugacagagaugagucuccaaguaaagggggccucacaucaauaauuaggaaacuuagauauaagucgcccuuuucugaaaauucuaccccaagucauuuagauuuuuaaaaaauauuucuaauguuaaaauauugggaccaaauuagaaucaauaguauaagauuaauuaauuagaguaaaaauaucuauuaaggcagagaaaguuuagagaaaaaaauccaaagaaauuuguguuucuuccuauucugaacaaguaaauccauccauccauccauccaaaccuccuuuaucuaacugugucuacuaaaagcaccauguuuuguggggaacacucagauaaauggaauaucauccucaacuucaaaauucuaugaucuaggagauuuaauuaaaaugacauuuuaauuuuucuaugcguuccaacaaucagauugcauagucucuuuugugaauagcugucauauaaucaguuguacuguaagauaucuccuuuaaacucauuugggauauaaguuaaacauccuucaaauuguugauguugacaaacaggauaauuucaauaauauuauucaaacauaaacuggucuaggagaauauugcaucacugacuaauuagccuaucuagagucuaacuucaccauuaaaccaaaagcagauggugguccuuggccaagaauauuggagacauuggaguugguuuuuuucuaagcuauaagaagugaggcgagcugaaaaaguaugguagagcaggagaaggguuugugagauuccuucuagugaaguucacccucaaacuuuucagggguaaagacacagagugauucaggggccacaaucuaauagcucagggcucuccuauccauucagagaagucucuaggaaaagggaucucauaucaguacuuaugaaaaauugaauauaagccucccuuucuaaauaaaucugcaucgagucaucacagcccucuuuuuggauacuauaccuugauuuuuuuuuucugauuuacaauaugcauaugguuucuacugggcuauagaaagcagaaucacucauuuuggagaaggaaaaaaugaauaguuaaaacaaacuuuuaacuguuaagguaacagaaauguauuuagugaaugucucuuuccuccuaagaacacaagacuucuacauguuggguaauaccuagagaugcauguaggaauaauccaaaaugacccaaaugcuuuauaauagcaccacuuuauaauucuuuugaaugauuucuguaguauauaauugacuucaguuguuugaguguuuuuuguuuuauuuuuguccccccugggaaaacauauuucagcauguauaagagggagaaaaaaaguuucauuccuuccagagaauaacuuauuuaguccaguaggguagaauuuuaaaaugucaguuaaagucuucaaagugcuuggggggauaucagauuccagaggccaauuguagcaauugaaauuugcagaaucaauuauguaaaucugagacaaauuaguauuaaaauuacacggaguauauuuuuuaaaucacccaacuuuguagauuauaccuauuuugggcagguauggaaaaauuuugcaguuaaaugauugccuaaagaaagugguaaacaggugaggaaagauggccucugaucuaggauagauccagaaccacaaagcaucugcaccacaaaagguguuagacuaccaagcagcuccugguuuucugcauaguauuaguagcacagcuuaggaugagaauccuuucuccaguaacauucuuaaaauagcaugaaaaacaacgcaaaacucaaauuucuauuaaaacacacaaacuaaaaucaagugauucuuuuuuguagauuagggagaaggacugaauaucuaauuuaagagaaggaauaguguuuaaguguuauagugugugagcuaauaccuucuaaaggaaagacauggcaugaagauugugcauacuuacaaugcuaaggaaaaaucaagaaaaggacugugugaggcucugcuacuagaugaaguuggaaggacuauuaaugugcuucuugaaguaucaaaaaugaaaagaaaauuaaaauuguuuaagccugacagggaaggauguaaauacaaguuuuucuagagcucucuaaccuuuauuucaaaacuggaauuauucauccaucuguaauuguugauaauuuaacuaguauauguaguucauaagguaauagaaaaggugaucaugaaagcauguauauaacuggacagaaccacgauaaugcuauaagauguagauuuaguuagguuaucagauguuaaaugauuuuaauauuauuaaauaaaucaaacuagaaaacuaaccacaaguauaauguaacaaaguuaaaugcaggauauaaaaauguaggauggauuuugcauaguaaaaagauaaguuugccauuuaaaauuguuguuuguuggguuuagcugaaaguaggcauauaugguuccacuugggaaaacuugcuuuaaagcauuacaaugaacaauuuuuucucauucucuuauuccuuuaucacuuuuuaaauguaaagaaaauuguauuuauuuauuuuuuuaaauaaacaccaccuugcagaauuuaauaggcaaacauguuacauaugacuaaguaagggucuucaagaugaaguaaagaaaauguaaauguucuauuaccuuaugcagagacaaaaaaaaaaaggaguggugucauuuagcuagcaaacaaacaaaauacaguuaauuggugauauguccuuucuuuucucacuaugcccucuugccuccaaaaaugacaacaaagaaucacaauuuuucugauaaauaaaugcuaaaccaagcguuucaaacuauugcauugccauucuuuuggacuuuaguuauuagaaugaugauuguuauagggcaaaugagaaauccaugugcaucagcuucuaguuguuaaaaaaaccagauaaauuaacuucuacuguauacugugggcagaggauccuagagcugauccuacaacaucagcuucuaguuguuaaaaaaaaaaaaagaaacagauaaauuaacuucuacuguauauacugugggcagaggaucuuacugugccucuguuuguguacauggacuucgguguguaucaguuugaaggacagccuugccccauguaaacauauaaaugcagauugguaucgccugguugcuauuugcuuaagaacaaauauuauacagaugagaucaggcauaauuuuaaaagaucauuaucaguggagaccucauuauuacugauauuacaauggggccaguuuuuauacuucuggguagaauuaauaaaauuuuucugaucccagagaucugaguucucucugcaguuggaaacaagaagcuguugugggcauugugucgggccaggggcccuuguguuugugugggcaaauaucuuuuagcagugugagcugcuuuuuucuuuucauuaaaagucucucuaaaauaauagaaauuucagauacucgguucaagucucacugauuuuguagagguccaaaaauguaggaucugucacuuuugcaggccccugccucaccuaauuccuggccaggugacauuuugggcagaaguaaaugcuucuauagucacaagcuaaaaugacucuaagccccaauuucacgggggguauucacaugcuuccucuggaaaauacucuuugacagucagcuuugcaaguaagugauuaccuuguuaggaaucaaagaaaaauguauuucucucugaccuuuagaggaaaauagaauccuucccuuuuuugcccauugacacaacuggcacugcucucuucccuuucuaccacccugguucaaaguagucccccgaugcuguccuguuccuuucuuaagccauaguggaucucugagauccuacaccccacuuugugaaacacugacuucaucuuugcccucgaaugccugauuuuuucauaagagauucuagcaauuuggacacuguuuaagugaacuaucaaacuaccgcauagagaauauuuaagcuauuaaaauuaugguuucccaugaagaucaauucucuguguccuucccuauaggaauuugagacgaguuagcccugugaugaaucuugaaacucacauauguccacauacacuugguagaacuucgauuuaaucuuuacauaaaagcuguacauauaaccaagaaguuauuuuugccaguaaauuaacuuauuugcuuuauucaucuuauuugguuccuaaucguaaauauuuuguagcugcuguaaauuuuuuucucccaaaugaggagucuuauuaucauaaagguaaaggcuauucagcuuugauaaccaccugcaauucuuuuuuggaucauucauccaucuaacaaauacauaaugaggacaguucauguuaaugaaaauccauguuguuuaauagaaugccauccuuuaccuacuuuugcucuuuauggacguuuuucuuuucaugcucuagugagcuuucccuauaucaugagaagugguuauauuugugcaaauauacaaauauaggaaaacaaagauucauaccuguaggcaauagucuaacuuguccaaaccacuuugccuuuacugcuauuuuuauccccaaugcguagauauuucccccaggccuauagccuuugugaaggaaagcaaaucauaccuccuguauauugacacgaaucugguuuucaaaugucauuuccagauuuuuuaguuaauuggggguuguccuuuucccuuaaugugagagucauuuuccuguauauuucuggaucucucaggggcugggaggggggagugaggggacuacaaccauagcacuccaagaacccuuuugggauuacuccaguaaucaacuacgaaaguuauuuucuaaauguagauauguaagguguucuuuuaaaguaagguacuuugaaauauguagcauaaacugguacugcuguuaaaugggucgauuauuaaacggagcagcugugugagggcagcuaacuuugaaugccugucucccuggcuggugugucuccuucucauguugagagcaccagggauugcguggcugcaugcugaaaccgcauuuucccaugguguaugacuaguucaucucuuucuugagcaccauuacaagaagaucaaaugaaaaugagaucaauguggaagacaauucauagcacaaaaaaagucaucuuaaaucuacucucaaacauucaucuuauacaugcaucaaaguaauuuacugacaucaguuugggugagagagggagucacuuuacugaaaaggcagaggcuuaagguguauacauuuguacucacuuccuuauuuucuuaacuuguaagcagaaaacaagcccucucucuugugaaguaucuucaaaggauuggggugcaaaaauaccuugcugguaagccaucaauguuuuauuuaaaucccugcauucaaaguuagcugccuuuuugaaauaaacaaacaaaaaauacuacuguauguuugaaaaugugaauaguauuuuuauagcuuguuaaagacauggcuaguugcauuuguaaauaaguauaauguugcuuugauuuucuuuuguggacaucuuuauuuggaacauaauugucuuuaggguugauuuguauauaaguaauuggccugugauuguuucuuuuuugguuggaaguuaucauuuugacauuacuugugauucuguguucagcacuauugugauguguucaaccucugcacucgcuuacacaauaggauaugccaauugugugugguguaauguuauuuugauuuuuuuccauguuauugaugaaggaucaugcaccuaacacauacuaacuuuuuuaauguuaggcauauuuuuaguauacuuucucuuauucuuucuucuccuccaaccuuuuacccauccuccuuccuuucccucauuccuguuguuauuugagaaugagggagaaacaguauuuuacauuuauguaauuaggcuuuuccguuaguucucaaggauccucuuuuggcucuugggaaagaauuguaccuguacaaggcaauuauagaaugcgaacugcuuugccucauuccauacugaucaucccagcugaacaauuugaaaacuguucugccuuuuuguuacaugaaucugucagaaauauauuuuuaauuuaauauaaaugaaauucaauaaaauaugaaacaaacguuaaaaaaaaaaaaaaaaaa

SEQ ID NO: 3098 - RNA, 19 nt, Artificial Sequence
  Description of Artificial Sequence: Synthetic oligonucleotide
cacgcgcgcccggcugggg

SEQ ID NO: 3099 - RNA, 19 nt, Artificial Sequence
  Description of Artificial Sequence: Synthetic oligonucleotide
ggaucuccuccgcgugccc

SEQ ID NO: 3100 - RNA, 19 nt, Artificial Sequence
  Description of Artificial Sequence: Synthetic oligonucleotide
cgaaagggggauaugccau

SEQ ID NO: 3101 - RNA, 19 nt, Artificial Sequence
  Description of Artificial Sequence: Synthetic oligonucleotide
uuuggacauguaauuguca

SEQ ID NO: 3102 - RNA, 19 nt, Artificial Sequence
  Description of Artificial Sequence: Synthetic oligonucleotide
agcacgggaucugagacuu

SEQ ID NO: 3103 - RNA, 19 nt, Artificial Sequence
  Description of Artificial Sequence: Synthetic oligonucleotide
uccaaaaaaugaagccggc

SEQ ID NO: 3104 - RNA, 19 nt, Artificial Sequence
  Description of Artificial Sequence: Synthetic oligonucleotide
cgacaggacuuugggucug

SEQ ID NO: 3105 - RNA, 19 nt, Artificial Sequence
  Description of Artificial Sequence: Synthetic oligonucleotide
gggugagccuucucguggc

SEQ ID NO: 3106 - RNA, 19 nt, Artificial Sequence
  Description of Artificial Sequence: Synthetic oligonucleotide
cggcggggaccguccagcc

SEQ ID NO: 3107 - RNA, 19 nt, Artificial Sequence
  Description of Artificial Sequence: Synthetic oligonucleotide
ccagcgauucucagucagu

SEQ ID NO: 3108 - RNA, 19 nt, Artificial Sequence
  Description of Artificial Sequence: Synthetic oligonucleotide
ugugugcaggaacggagaa

SEQ ID NO: 3109 - RNA, 19 nt, Artificial Sequence
  Description of Artificial Sequence: Synthetic oligonucleotide
auaaacugagcucucucuc

SEQ ID NO: 3110 - RNA, 19 nt, Artificial Sequence
  Description of Artificial Sequence: Synthetic oligonucleotide
cugaccuggaacagcagua

SEQ ID NO: 3111 - RNA, 19 nt, Artificial Sequence
  Description of Artificial Sequence: Synthetic oligonucleotide
accgagccuugcgcaagua

SEQ ID NO: 3112 - RNA, 19 nt, Artificial Sequence
  Description of Artificial Sequence: Synthetic oligonucleotide
acuaugaaaacugugaggu

SEQ ID NO: 3113 - RNA, 19 nt, Artificial Sequence
  Description of Artificial Sequence: Synthetic oligonucleotide
uugucaugggcaaccugga

SEQ ID NO: 3114 - RNA, 19 nt, Artificial Sequence
  Description of Artificial Sequence: Synthetic oligonucleotide
agauaaccagcauugagca

SEQ ID NO: 3115 - RNA, 19 nt, Artificial Sequence
  Description of Artificial Sequence: Synthetic oligonucleotide
acaaccgggaccucuccuu

SEQ ID NO: 3116 - RNA, 19 nt, Artificial Sequence
  Description of Artificial Sequence: Synthetic oligonucleotide
uccugcggucuguucgaga

SEQ ID NO: 3117 - RNA, 19 nt, Artificial Sequence
  Description of Artificial Sequence: Synthetic oligonucleotide
aagucacaggcuacguguu

SEQ ID NO: 3118 - RNA, 19 nt, Artificial Sequence
  Description of Artificial Sequence: Synthetic oligonucleotide
uaguggcucuuaaucaguu

SEQ ID NO: 3119 - RNA, 19 nt, Artificial Sequence
  Description of Artificial Sequence: Synthetic oligonucleotide
uucguuaccugccucugga

SEQ ID NO: 3120 - RNA, 19 nt, Artificial Sequence
  Description of Artificial Sequence: Synthetic oligonucleotide
agaauuuacgcauuauucg

SEQ ID NO: 3121 - RNA, 19 nt, Artificial Sequence
  Description of Artificial Sequence: Synthetic oligonucleotide
gugggacaaaacuuuauga

SEQ ID NO: 3122 - RNA, 19 nt, Artificial Sequence
  Description of Artificial Sequence: Synthetic oligonucleotide
aggaucgauaugccuuggc

SEQ ID NO: 3123 - RNA, 19 nt, Artificial Sequence
  Description of Artificial Sequence: Synthetic oligonucleotide
caauauuuuuaaacuacag

SEQ ID NO: 3124 - RNA, 19 nt, Artificial Sequence
  Description of Artificial Sequence: Synthetic oligonucleotide
gaaaagauggaaacuuugg

SEQ ID NO: 3125 - RNA, 19 nt, Artificial Sequence
  Description of Artificial Sequence: Synthetic oligonucleotide
gacuucaagaacuuggauu

SEQ ID NO: 3126 - RNA, 19 nt, Artificial Sequence
  Description of Artificial Sequence: Synthetic oligonucleotide
uaaagaacuugacagaaau

SEQ ID NO: 3127 - RNA, 19 nt, Artificial Sequence
  Description of Artificial Sequence: Synthetic oligonucleotide
uccuaaaugguggagucua

SEQ ID NO: 3128 - RNA, 19 nt, Artificial Sequence
  Description of Artificial Sequence: Synthetic oligonucleotide
auguagaccagaacaaauu

SEQ ID NO: 3129 - RNA, 19 nt, Artificial Sequence
  Description of Artificial Sequence: Synthetic oligonucleotide
uccuuuguuaugcagacac

SEQ ID NO: 3130 - RNA, 19 nt, Artificial Sequence
  Description of Artificial Sequence: Synthetic oligonucleotide
ccauucauuggcaagauau

SEQ ID NO: 3131 - RNA, 19 nt, Artificial Sequence
  Description of Artificial Sequence: Synthetic oligonucleotide
uuguucggaacccauggcc

SEQ ID NO: 3132 - RNA, 19 nt, Artificial Sequence
  Description of Artificial Sequence: Synthetic oligonucleotide
cuuccaacuugacucuugu

SEQ ID NO: 3133 - RNA, 19 nt, Artificial Sequence
  Description of Artificial Sequence: Synthetic oligonucleotide
ugucaacaaaugguaguuc

SEQ ID NO: 3134 - RNA, 19 nt, Artificial Sequence
  Description of Artificial Sequence: Synthetic oligonucleotide
caggauguggacguugcca

SEQ ID NO: 3135 - RNA, 19 nt, Artificial Sequence
  Description of Artificial Sequence: Synthetic oligonucleotide
auaaguccuguacuggccg

SEQ ID NO: 3136 - RNA, 19 nt, Artificial Sequence
  Description of Artificial Sequence: Synthetic oligonucleotide
guugcuggggacccacaga

SEQ ID NO: 3137 - RNA, 19 nt, Artificial Sequence
  Description of Artificial Sequence: Synthetic oligonucleotide
aaaaucauugccagacuuu

SEQ ID NO: 3138 - RNA, 19 nt, Artificial Sequence
  Description of Artificial Sequence: Synthetic oligonucleotide
ugacaaggacggugugugc

SEQ ID NO: 3139 - RNA, 19 nt, Artificial Sequence
  Description of Artificial Sequence: Synthetic oligonucleotide
cagaacaaugugacggcag

SEQ ID NO: 3140 - RNA, 19 nt, Artificial Sequence
  Description of Artificial Sequence: Synthetic oligonucleotide
gaugcuacggaccuuacgu

SEQ ID NO: 3141 - RNA, 19 nt, Artificial Sequence
  Description of Artificial Sequence: Synthetic oligonucleotide
ucagugacugcugccaucg

SEQ ID NO: 3142 - RNA, 19 nt, Artificial Sequence
  Description of Artificial Sequence: Synthetic oligonucleotide
gagaaugugcuggaggcug

SEQ ID NO: 3143 - RNA, 19 nt, Artificial Sequence
  Description of Artificial Sequence: Synthetic oligonucleotide
gcucaggaccuaaggacac

SEQ ID NO: 3144 - RNA, 19 nt, Artificial Sequence
  Description of Artificial Sequence: Synthetic oligonucleotide
cagacugcuuugccugcau

SEQ ID NO: 3145 - RNA, 19 nt, Artificial Sequence
  Description of Artificial Sequence: Synthetic oligonucleotide
ugaauuucaaugacagugg

SEQ ID NO: 3146 - RNA, 19 nt, Artificial Sequence
  Description of Artificial Sequence: Synthetic oligonucleotide
gagcauguguuacucagug

SEQ ID NO: 3147 - RNA, 19 nt, Artificial Sequence
  Description of Artificial Sequence: Synthetic oligonucleotide
guccccaaaccuuugucua

SEQ ID NO: 3148 - RNA, 19 nt, Artificial Sequence
  Description of Artificial Sequence: Synthetic oligonucleotide
acaauccaaccaccuuuca

SEQ ID NO: 3149 - RNA, 19 nt, Artificial Sequence
  Description of Artificial Sequence: Synthetic oligonucleotide
aacuggagcacaauuucaa

SEQ ID NO: 3150 - RNA, 19 nt, Artificial Sequence
  Description of Artificial Sequence: Synthetic oligonucleotide
augcaaaguacacauaugg

SEQ ID NO: 3151 - RNA, 19 nt, Artificial Sequence
  Description of Artificial Sequence: Synthetic oligonucleotide
gagcauucugugucaagaa

SEQ ID NO: 3152 - RNA, 19 nt, Artificial Sequence
  Description of Artificial Sequence: Synthetic oligonucleotide
aauguccacauaacuuugu

SEQ ID NO: 3153 - RNA, 19 nt, Artificial Sequence
  Description of Artificial Sequence: Synthetic oligonucleotide
ugguagauuccaguucuug

SEQ ID NO: 3154 - RNA, 19 nt, Artificial Sequence
  Description of Artificial Sequence: Synthetic oligonucleotide
gugugcgugccugcccuag

SEQ ID NO: 3155 - RNA, 19 nt, Artificial Sequence
  Description of Artificial Sequence: Synthetic oligonucleotide
guuccaagauggaaguaga

SEQ ID NO: 3156 - RNA, 19 nt, Artificial Sequence
  Description of Artificial Sequence: Synthetic oligonucleotide
aagaaaaugggauuaaaau

SEQ ID NO: 3157 - RNA, 19 nt, Artificial Sequence
  Description of Artificial Sequence: Synthetic oligonucleotide
uguguaaaccuugcacuga

SEQ ID NO: 3158 - RNA, 19 nt, Artificial Sequence
  Description of Artificial Sequence: Synthetic oligonucleotide
acauuugcccaaaagcuug

SEQ ID NO: 3159 - RNA, 19 nt, Artificial Sequence
  Description of Artificial Sequence: Synthetic oligonucleotide
gugauggcauuggcacagg

SEQ ID NO: 3160 - RNA, 19 nt, Artificial Sequence
  Description of Artificial Sequence: Synthetic oligonucleotide
gaucauugaugucagcuca

SEQ ID NO: 3161 - RNA, 19 nt, Artificial Sequence
  Description of Artificial Sequence: Synthetic oligonucleotide
agacuguggauuccaguaa

SEQ ID NO: 3162 - RNA, 19 nt, Artificial Sequence
  Description of Artificial Sequence: Synthetic oligonucleotide
acauugacaaauucauaaa

SEQ ID NO: 3163 - RNA, 19 nt, Artificial Sequence
  Description of Artificial Sequence: Synthetic oligonucleotide
acuguaccaagaucaaugg

SEQ ID NO: 3164 - RNA, 19 nt, Artificial Sequence
  Description of Artificial Sequence: Synthetic oligonucleotide
ggaauuugaucuuucuagu

SEQ ID NO: 3165 - RNA, 19 nt, Artificial Sequence
  Description of Artificial Sequence: Synthetic oligonucleotide
ucacugguauucaugggga

SEQ ID NO: 3166 - RNA, 19 nt, Artificial Sequence
  Description of Artificial Sequence: Synthetic oligonucleotide
acccuuacaaugcaauuga

SEQ ID NO: 3167 - RNA, 19 nt, Artificial Sequence
  Description of Artificial Sequence: Synthetic oligonucleotide
aagccauagacccagagaa

SEQ ID NO: 3168 - RNA, 19 nt, Artificial Sequence
  Description of Artificial Sequence: Synthetic oligonucleotide
aacugaacgucuuucggac

SEQ ID NO: 3169 - RNA, 19 nt, Artificial Sequence
  Description of Artificial Sequence: Synthetic oligonucleotide
cagucagagagauaacagg

SEQ ID NO: 3170 - RNA, 19 nt, Artificial Sequence
  Description of Artificial Sequence: Synthetic oligonucleotide
guuuccugaacauacaguc

SEQ ID NO: 3171 - RNA, 19 nt, Artificial Sequence
  Description of Artificial Sequence: Synthetic oligonucleotide
cauggccaccaaacaugac

SEQ ID NO: 3172 - RNA, 19 nt, Artificial Sequence
  Description of Artificial Sequence: Synthetic oligonucleotide
cugacuucaguguuuuuuc

SEQ ID NO: 3173 - RNA, 19 nt, Artificial Sequence
  Description of Artificial Sequence: Synthetic oligonucleotide
cuaaccuggugaccauugg

SEQ ID NO: 3174 - RNA, 19 nt, Artificial Sequence
  Description of Artificial Sequence: Synthetic oligonucleotide
guggaagaguacucuauag

SEQ ID NO: 3175 - RNA, 19 nt, Artificial Sequence
  Description of Artificial Sequence: Synthetic oligonucleotide
guggccuguccuugcuuau

SEQ ID NO: 3176 - RNA, 19 nt, Artificial Sequence
  Description of Artificial Sequence: Synthetic oligonucleotide
uccucaagcaacagggcau

SEQ ID NO: 3177 - RNA, 19 nt, Artificial Sequence
  Description of Artificial Sequence: Synthetic oligonucleotide
ucaccucucuacaguucca

SEQ ID NO: 3178 - RNA, 19 nt, Artificial Sequence
  Description of Artificial Sequence: Synthetic oligonucleotide
agucccugaaggaaaucag

SEQ ID NO: 3179 - RNA, 19 nt, Artificial Sequence
  Description of Artificial Sequence: Synthetic oligonucleotide
gcgcaggaaacaucuauau

SEQ ID NO: 3180 - RNA, 19 nt, Artificial Sequence
  Description of Artificial Sequence: Synthetic oligonucleotide
uuacugacaacagcaaccu

SEQ ID NO: 3181 - RNA, 19 nt, Artificial Sequence
  Description of Artificial Sequence: Synthetic oligonucleotide
uguguuauuaucauaccau

SEQ ID NO: 3182 - RNA, 19 nt, Artificial Sequence
  Description of Artificial Sequence: Synthetic oligonucleotide
uuaacuggacaacacucuu

SEQ ID NO: 3183 - RNA, 19 nt, Artificial Sequence
  Description of Artificial Sequence: Synthetic oligonucleotide
ucagcacaaucaaccagag

SEQ ID NO: 3184 - RNA, 19 nt, Artificial Sequence
  Description of Artificial Sequence: Synthetic oligonucleotide
gaauaguaauccgggacaa

SEQ ID NO: 3185 - RNA, 19 nt, Artificial Sequence
  Description of Artificial Sequence: Synthetic oligonucleotide
acagaaaagcugaaaauug

SEQ ID NO: 3186 - RNA, 19 nt, Artificial Sequence
  Description of Artificial Sequence: Synthetic oligonucleotide
guacugcugaaggaauggu

SEQ ID NO: 3187 - RNA, 19 nt, Artificial Sequence
  Description of Artificial Sequence: Synthetic oligonucleotide
ugugcaaccaucuguguuc

SEQ ID NO: 3188 - RNA, 19 nt, Artificial Sequence
  Description of Artificial Sequence: Synthetic oligonucleotide
ccagugauggcuguugggg

SEQ ID NO: 3189 - RNA, 19 nt, Artificial Sequence
  Description of Artificial Sequence: Synthetic oligonucleotide
gaccugggccagaccaaug

SEQ ID NO: 3190 - RNA, 19 nt, Artificial Sequence
  Description of Artificial Sequence: Synthetic oligonucleotide
gucugucgugucgccgcuu

SEQ ID NO: 3191 - RNA, 19 nt, Artificial Sequence
  Description of Artificial Sequence: Synthetic oligonucleotide
ucaguagaggaaggaucug

SEQ ID NO: 3192 - RNA, 19 nt, Artificial Sequence
  Description of Artificial Sequence: Synthetic oligonucleotide
gcauagagucuuguaaccu

SEQ ID NO: 3193 - RNA, 19 nt, Artificial Sequence
  Description of Artificial Sequence: Synthetic oligonucleotide
ucuaugauggugaauuucg

SEQ ID NO: 3194 - RNA, 19 nt, Artificial Sequence
  Description of Artificial Sequence: Synthetic oligonucleotide
gggaguuugagaauggcuc

SEQ ID NO: 3195 - RNA, 19 nt, Artificial Sequence
  Description of Artificial Sequence: Synthetic oligonucleotide
ccaucuguguggaguguga

SEQ ID NO: 3196 - RNA, 19 nt, Artificial Sequence
  Description of Artificial Sequence: Synthetic oligonucleotide
acccccagugugagaagau

SEQ ID NO: 3197 - RNA, 19 nt, Artificial Sequence
  Description of Artificial Sequence: Synthetic oligonucleotide
uggaagauggccuccucac

SEQ ID NO: 3198 - RNA, 19 nt, Artificial Sequence
  Description of Artificial Sequence: Synthetic oligonucleotide
caugccauggaccgggucc

SEQ ID NO: 3199 - RNA, 19 nt, Artificial Sequence
  Description of Artificial Sequence: Synthetic oligonucleotide
cugacaacuguacaaagug

SEQ ID NO: 3200 - RNA, 19 nt, Artificial Sequence
  Description of Artificial Sequence: Synthetic oligonucleotide
gcucucauuuuaaagaugg

SEQ ID NO: 3201 - RNA, 19 nt, Artificial Sequence
  Description of Artificial Sequence: Synthetic oligonucleotide
gcccaaacuguguggaaaa

SEQ ID NO: 3202 - RNA, 19 nt, Artificial Sequence
  Description of Artificial Sequence: Synthetic oligonucleotide
aauguccagauggcuuaca

SEQ ID NO: 3203 - RNA, 19 nt, Artificial Sequence
  Description of Artificial Sequence: Synthetic oligonucleotide
agggggcaaacaguuucau

SEQ ID NO: 3204 - RNA, 19 nt, Artificial Sequence
  Description of Artificial Sequence: Synthetic oligonucleotide
uuuucaaguaugcugaucc

SEQ ID NO: 3205 - RNA, 19 nt, Artificial Sequence
  Description of Artificial Sequence: Synthetic oligonucleotide
cagaucgggagugccaccc

SEQ ID NO: 3206 - RNA, 19 nt, Artificial Sequence
  Description of Artificial Sequence: Synthetic oligonucleotide
caugccauccaaacugcac

SEQ ID NO: 3207 - RNA, 19 nt, Artificial Sequence
  Description of Artificial Sequence: Synthetic oligonucleotide
cccaaggguguaacggucc

SEQ ID NO: 3208 - RNA, 19 nt, Artificial Sequence
  Description of Artificial Sequence: Synthetic oligonucleotide
ccacuagucaugacugcau

SEQ ID NO: 3209 - RNA, 19 nt, Artificial Sequence
  Description of Artificial Sequence: Synthetic oligonucleotide
uuuacuacccauggacggg

SEQ ID NO: 3210 - RNA, 19 nt, Artificial Sequence
  Description of Artificial Sequence: Synthetic oligonucleotide
gccauuccacuuuaccaca

SEQ ID NO: 3211 - RNA, 19 nt, Artificial Sequence
  Description of Artificial Sequence: Synthetic oligonucleotide
aacaugcuagaacuccccu

SEQ ID NO: 3212 - RNA, 19 nt, Artificial Sequence
  Description of Artificial Sequence: Synthetic oligonucleotide
ugauugcagcuggaguaau

SEQ ID NO: 3213 - RNA, 19 nt, Artificial Sequence
  Description of Artificial Sequence: Synthetic oligonucleotide
uuggugggcucuucauucu

SEQ ID NO: 3214 - RNA, 19 nt, Artificial Sequence
  Description of Artificial Sequence: Synthetic oligonucleotide
uggucauugugggucugac

SEQ ID NO: 3215 - RNA, 19 nt, Artificial Sequence
  Description of Artificial Sequence: Synthetic oligonucleotide
cauuugcuguuuauguuag

SEQ ID NO: 3216 - RNA, 19 nt, Artificial Sequence
  Description of Artificial Sequence: Synthetic oligonucleotide
gaaggaagagcaucaaaaa

SEQ ID NO: 3217 - RNA, 19 nt, Artificial Sequence
  Description of Artificial Sequence: Synthetic oligonucleotide
agaaaagagccuugagaag

SEQ ID NO: 3218 - RNA, 19 nt, Artificial Sequence
  Description of Artificial Sequence: Synthetic oligonucleotide
gauucuuggaaacagaguu

SEQ ID NO: 3219 - RNA, 19 nt, Artificial Sequence
  Description of Artificial Sequence: Synthetic oligonucleotide
ugguggaaccauuaacucc

SEQ ID NO: 3220 - RNA, 19 nt, Artificial Sequence
  Description of Artificial Sequence: Synthetic oligonucleotide
ccaguggcacagcacccaa

SEQ ID NO: 3221 - RNA, 19 nt, Artificial Sequence
  Description of Artificial Sequence: Synthetic oligonucleotide
aucaagcucaacuucguau

SEQ ID NO: 3222 - RNA, 19 nt, Artificial Sequence
  Description of Artificial Sequence: Synthetic oligonucleotide
uuuugaaagaaacugagcu

SEQ ID NO: 3223 - RNA, 19 nt, Artificial Sequence
  Description of Artificial Sequence: Synthetic oligonucleotide
ugaagaggguaaaaguccu

SEQ ID NO: 3224 - RNA, 19 nt, Artificial Sequence
  Description of Artificial Sequence: Synthetic oligonucleotide
uuggcucaggugcuuuugg

SEQ ID NO: 3225 - RNA, 19 nt, Artificial Sequence
  Description of Artificial Sequence: Synthetic oligonucleotide
gaacgguuuauaaagguau

SEQ ID NO: 3226 - RNA, 19 nt, Artificial Sequence
  Description of Artificial Sequence: Synthetic oligonucleotide
uuuggguaccugaaggaga

SEQ ID NO: 3227 - RNA, 19 nt, Artificial Sequence
  Description of Artificial Sequence: Synthetic oligonucleotide
aaacugugaagauuccugu

SEQ ID NO: 3228 - RNA, 19 nt, Artificial Sequence
  Description of Artificial Sequence: Synthetic oligonucleotide
uggcuauuaagauucuuaa

SEQ ID NO: 3229 - RNA, 19 nt, Artificial Sequence
  Description of Artificial Sequence: Synthetic oligonucleotide
augagacaacuggucccaa

SEQ ID NO: 3230 - RNA, 19 nt, Artificial Sequence
  Description of Artificial Sequence: Synthetic oligonucleotide
aggcaaauguggaguucau

SEQ ID NO: 3231 - RNA, 19 nt, Artificial Sequence
  Description of Artificial Sequence: Synthetic oligonucleotide
uggaugaagcucugaucau

SEQ ID NO: 3232 - RNA, 19 nt, Artificial Sequence
  Description of Artificial Sequence: Synthetic oligonucleotide
uggcaaguauggaucaucc

SEQ ID NO: 3233 - RNA, 19 nt, Artificial Sequence
  Description of Artificial Sequence: Synthetic oligonucleotide
cacaccuaguccgguugcu

SEQ ID NO: 3234 - RNA, 19 nt, Artificial Sequence
  Description of Artificial Sequence: Synthetic oligonucleotide
ugggugugugucugagccc

SEQ ID NO: 3235 - RNA, 19 nt, Artificial Sequence
  Description of Artificial Sequence: Synthetic oligonucleotide
caaccauccagcugguuac

SEQ ID NO: 3236 - RNA, 19 nt, Artificial Sequence
  Description of Artificial Sequence: Synthetic oligonucleotide
cucaacuuaugccccaugg

SEQ ID NO: 3237 - RNA, 19 nt, Artificial Sequence
  Description of Artificial Sequence: Synthetic oligonucleotide
gcugccuguuggaguaugu

SEQ ID NO: 3238 - RNA, 19 nt, Artificial Sequence
  Description of Artificial Sequence: Synthetic oligonucleotide
uccacgagcacaaggauaa

SEQ ID NO: 3239 - RNA, 19 nt, Artificial Sequence
  Description of Artificial Sequence: Synthetic oligonucleotide
acauuggaucacaacugcu

SEQ ID NO: 3240 - RNA, 19 nt, Artificial Sequence
  Description of Artificial Sequence: Synthetic oligonucleotide
ugcuuaacuggugugucca

SEQ ID NO: 3241 - RNA, 19 nt, Artificial Sequence
  Description of Artificial Sequence: Synthetic oligonucleotide
agauagcuaagggaaugau

SEQ ID NO: 3242 - RNA, 19 nt, Artificial Sequence
  Description of Artificial Sequence: Synthetic oligonucleotide
uguaccuggaagaaagacg

SEQ ID NO: 3243 - RNA, 19 nt, Artificial Sequence
  Description of Artificial Sequence: Synthetic oligonucleotide
gacucguucaucgggauuu

SEQ ID NO: 3244 - RNA, 19 nt, Artificial Sequence
  Description of Artificial Sequence: Synthetic oligonucleotide
uggcagcccguaaugucuu

SEQ ID NO: 3245 - RNA, 19 nt, Artificial Sequence
  Description of Artificial Sequence: Synthetic oligonucleotide
uagugaaaucuccaaacca

SEQ ID NO: 3246 - RNA, 19 nt, Artificial Sequence
  Description of Artificial Sequence: Synthetic oligonucleotide
augugaaaaucacagauuu

SEQ ID NO: 3247 - RNA, 19 nt, Artificial Sequence
  Description of Artificial Sequence: Synthetic oligonucleotide
uugggcuagccagacucuu

SEQ ID NO: 3248 - RNA, 19 nt, Artificial Sequence
  Description of Artificial Sequence: Synthetic oligonucleotide
uggaaggagaugaaaaaga

SEQ ID NO: 3249 - RNA, 19 nt, Artificial Sequence
  Description of Artificial Sequence: Synthetic oligonucleotide
aguacaaugcugauggagg

SEQ ID NO: 3250 - RNA, 19 nt, Artificial Sequence
  Description of Artificial Sequence: Synthetic oligonucleotide
gaaagaugccaauuaaaug

SEQ ID NO: 3251 - RNA, 19 nt, Artificial Sequence
  Description of Artificial Sequence: Synthetic oligonucleotide
ggauggcucuggaguguau

SEQ ID NO: 3252 - RNA, 19 nt, Artificial Sequence
  Description of Artificial Sequence: Synthetic oligonucleotide
uacauuacaggaaauucac

SEQ ID NO: 3253 - RNA, 19 nt, Artificial Sequence
  Description of Artificial Sequence: Synthetic oligonucleotide
cccaucagagugacguuug

SEQ ID NO: 3254 - RNA, 19 nt, Artificial Sequence
  Description of Artificial Sequence: Synthetic oligonucleotide
ggagcuauggaguuacuau

SEQ ID NO: 3255 - RNA, 19 nt, Artificial Sequence
  Description of Artificial Sequence: Synthetic oligonucleotide
uaugggaacugaugaccuu

SEQ ID NO: 3256 - RNA, 19 nt, Artificial Sequence
  Description of Artificial Sequence: Synthetic oligonucleotide
uuggaggaaaacccuauga

SEQ ID NO: 3257 - RNA, 19 nt, Artificial Sequence
  Description of Artificial Sequence: Synthetic oligonucleotide
auggaauuccaacgcgaga

SEQ ID NO: 3258 - RNA, 19 nt, Artificial Sequence
  Description of Artificial Sequence: Synthetic oligonucleotide
aaaucccugauuuauuaga

SEQ ID NO: 3259 - RNA, 19 nt, Artificial Sequence
  Description of Artificial Sequence: Synthetic oligonucleotide
agaaaggagaacguuugcc

SEQ ID NO: 3260 - RNA, 19 nt, Artificial Sequence
  Description of Artificial Sequence: Synthetic oligonucleotide
cucagccucccaucugcac

SEQ ID NO: 3261 - RNA, 19 nt, Artificial Sequence
  Description of Artificial Sequence: Synthetic oligonucleotide
cuauugacguuuacauggu

SEQ ID NO: 3262 - RNA, 19 nt, Artificial Sequence
  Description of Artificial Sequence: Synthetic oligonucleotide
ucauggucaaauguuggau

SEQ ID NO: 3263 - RNA, 19 nt, Artificial Sequence
  Description of Artificial Sequence: Synthetic oligonucleotide
ugauugaugcugacaguag

SEQ ID NO: 3264 - RNA, 19 nt, Artificial Sequence
  Description of Artificial Sequence: Synthetic oligonucleotide
gaccuaaauuuaaggaacu

SEQ ID NO: 3265 - RNA, 19 nt, Artificial Sequence
  Description of Artificial Sequence: Synthetic oligonucleotide
uggcugcugaguuuucaag

SEQ ID NO: 3266 - RNA, 19 nt, Artificial Sequence
  Description of Artificial Sequence: Synthetic oligonucleotide
ggauggcucgagacccuca

SEQ ID NO: 3267 - RNA, 19 nt, Artificial Sequence
  Description of Artificial Sequence: Synthetic oligonucleotide
aaagauaccuaguuauuca

SEQ ID NO: 3268 - RNA, 19 nt, Artificial Sequence
  Description of Artificial Sequence: Synthetic oligonucleotide
agggugaugaucguaugaa

SEQ ID NO: 3269 - RNA, 19 nt, Artificial Sequence
  Description of Artificial Sequence: Synthetic oligonucleotide
agcuucccaguccaaauga

SEQ ID NO: 3270 - RNA, 19 nt, Artificial Sequence
  Description of Artificial Sequence: Synthetic oligonucleotide
acagcaaguucuuucagaa

SEQ ID NO: 3271 - RNA, 19 nt, Artificial Sequence
  Description of Artificial Sequence: Synthetic oligonucleotide
aucucuuggaugaagagga

SEQ ID NO: 3272 - RNA, 19 nt, Artificial Sequence
  Description of Artificial Sequence: Synthetic oligonucleotide
auuuggaagauaugaugga

SEQ ID NO: 3273 - RNA, 19 nt, Artificial Sequence
  Description of Artificial Sequence: Synthetic oligonucleotide
augcugaggaguacuuggu

SEQ ID NO: 3274 - RNA, 19 nt, Artificial Sequence
  Description of Artificial Sequence: Synthetic oligonucleotide
ucccucaggcuuucaacau

SEQ ID NO: 3275 - RNA, 19 nt, Artificial Sequence
  Description of Artificial Sequence: Synthetic oligonucleotide
ucccaccucccaucuauac

SEQ ID NO: 3276 - RNA, 19 nt, Artificial Sequence
  Description of Artificial Sequence: Synthetic oligonucleotide
cuuccagagcaagaauuga

SEQ ID NO: 3277 - RNA, 19 nt, Artificial Sequence
  Description of Artificial Sequence: Synthetic oligonucleotide
acucgaauaggagugaaau

SEQ ID NO: 3278 - RNA, 19 nt, Artificial Sequence
  Description of Artificial Sequence: Synthetic oligonucleotide
uuggacacagcccuccucc

SEQ ID NO: 3279 - RNA, 19 nt, Artificial Sequence
  Description of Artificial Sequence: Synthetic oligonucleotide
cugccuacacccccauguc

SEQ ID NO: 3280 - RNA, 19 nt, Artificial Sequence
  Description of Artificial Sequence: Synthetic oligonucleotide
caggaaaccaguuuguaua

SEQ ID NO: 3281 - RNA, 19 nt, Artificial Sequence
  Description of Artificial Sequence: Synthetic oligonucleotide
accgagauggagguuuugc

SEQ ID NO: 3282 - RNA, 19 nt, Artificial Sequence
  Description of Artificial Sequence: Synthetic oligonucleotide
cugcugaacaaggaguguc

SEQ ID NO: 3283 - RNA, 19 nt, Artificial Sequence
  Description of Artificial Sequence: Synthetic oligonucleotide
cugugcccuacagagcccc

SEQ ID NO: 3284 - RNA, 19 nt, Artificial Sequence
  Description of Artificial Sequence: Synthetic oligonucleotide
caacuagcacaauuccaga

SEQ ID NO: 3285 - RNA, 19 nt, Artificial Sequence
  Description of Artificial Sequence: Synthetic oligonucleotide
aagcuccuguggcacaggg

SEQ ID NO: 3286 - RNA, 19 nt, Artificial Sequence
  Description of Artificial Sequence: Synthetic oligonucleotide
gugcuacugcugagauuuu

SEQ ID NO: 3287 - RNA, 19 nt, Artificial Sequence
  Description of Artificial Sequence: Synthetic oligonucleotide
uugaugacuccugcuguaa

SEQ ID NO: 3288 - RNA, 19 nt, Artificial Sequence
  Description of Artificial Sequence: Synthetic oligonucleotide
auggcacccuacgcaagcc

SEQ ID NO: 3289 - RNA, 19 nt, Artificial Sequence
  Description of Artificial Sequence: Synthetic oligonucleotide
caguggcaccccaugucca

SEQ ID NO: 3290 - RNA, 19 nt, Artificial Sequence
  Description of Artificial Sequence: Synthetic oligonucleotide
aagaggacaguagcaccca

SEQ ID NO: 3291 - RNA, 19 nt, Artificial Sequence
  Description of Artificial Sequence: Synthetic oligonucleotide
agagguacagugcugaccc

SEQ ID NO: 3292 - RNA, 19 nt, Artificial Sequence
  Description of Artificial Sequence: Synthetic oligonucleotide
ccaccguguuugccccaga

SEQ ID NO: 3293 - RNA, 19 nt, Artificial Sequence
  Description of Artificial Sequence: Synthetic oligonucleotide
aacggagcccacgaggaga

SEQ ID NO: 3294 - RNA, 19 nt, Artificial Sequence
  Description of Artificial Sequence: Synthetic oligonucleotide
agcuggaugaggaagguua

SEQ ID NO: 3295 - RNA, 19 nt, Artificial Sequence
  Description of Artificial Sequence: Synthetic oligonucleotide
acaugacuccuaugcgaga

SEQ ID NO: 3296 - RNA, 19 nt, Artificial Sequence
  Description of Artificial Sequence: Synthetic oligonucleotide
acaaacccaaacaagaaua

SEQ ID NO: 3297 - RNA, 19 nt, Artificial Sequence
  Description of Artificial Sequence: Synthetic oligonucleotide
accugaauccaguggagga

SEQ ID NO: 3298 - RNA, 19 nt, Artificial Sequence
  Description of Artificial Sequence: Synthetic oligonucleotide
agaacccuuuuguuucucg

SEQ ID NO: 3299 - RNA, 19 nt, Artificial Sequence
  Description of Artificial Sequence: Synthetic oligonucleotide
ggagaaaaaauggagaccu

SEQ ID NO: 3300 - RNA, 19 nt, Artificial Sequence
  Description of Artificial Sequence: Synthetic oligonucleotide
uucaagcauuggauaaucc

SEQ ID NO: 3301 - RNA, 19 nt, Artificial Sequence
  Description of Artificial Sequence: Synthetic oligonucleotide
ccgaauaucacaaugcauc

SEQ ID NO: 3302 - RNA, 19 nt, Artificial Sequence
  Description of Artificial Sequence: Synthetic oligonucleotide
ccaaugguccacccaaggc

SEQ ID NO: 3303 - RNA, 19 nt, Artificial Sequence
  Description of Artificial Sequence: Synthetic oligonucleotide
ccgaggaugaguaugugaa

SEQ ID NO: 3304 - RNA, 19 nt, Artificial Sequence
  Description of Artificial Sequence: Synthetic oligonucleotide
augagccacuguaccucaa

SEQ ID NO: 3305 - RNA, 19 nt, Artificial Sequence
  Description of Artificial Sequence: Synthetic oligonucleotide
acaccuuugccaacaccuu

SEQ ID NO: 3306 - RNA, 19 nt, Artificial Sequence
  Description of Artificial Sequence: Synthetic oligonucleotide
ugggaaaagcugaguaccu

SEQ ID NO: 3307 - RNA, 19 nt, Artificial Sequence
  Description of Artificial Sequence: Synthetic oligonucleotide
ugaagaacaacauacuguc

SEQ ID NO: 3308 - RNA, 19 nt, Artificial Sequence
  Description of Artificial Sequence: Synthetic oligonucleotide
caaugccagagaaggccaa

SEQ ID NO: 3309 - RNA, 19 nt, Artificial Sequence
  Description of Artificial Sequence: Synthetic oligonucleotide
agaaagcguuugacaaccc

SEQ ID NO: 3310 - RNA, 19 nt, Artificial Sequence
  Description of Artificial Sequence: Synthetic oligonucleotide
cugacuacuggaaccacag

SEQ ID NO: 3311 - RNA, 19 nt, Artificial Sequence
  Description of Artificial Sequence: Synthetic oligonucleotide
gccugccaccucggagcac

SEQ ID NO: 3312 - RNA, 19 nt, Artificial Sequence
  Description of Artificial Sequence: Synthetic oligonucleotide
cccuucagcacccagacua

SEQ ID NO: 3313 - RNA, 19 nt, Artificial Sequence
  Description of Artificial Sequence: Synthetic oligonucleotide
accugcaggaguacagcac

SEQ ID NO: 3314 - RNA, 19 nt, Artificial Sequence
  Description of Artificial Sequence: Synthetic oligonucleotide
caaaauauuuuuauaaaca

SEQ ID NO: 3315 - RNA, 19 nt, Artificial Sequence
  Description of Artificial Sequence: Synthetic oligonucleotide
agaaugggcggauccggcc

SEQ ID NO: 3316 - RNA, 19 nt, Artificial Sequence
  Description of Artificial Sequence: Synthetic oligonucleotide
cuauuguggcagagaaucc

SEQ ID NO: 3317 - RNA, 19 nt, Artificial Sequence
  Description of Artificial Sequence: Synthetic oligonucleotide
cugaauaccucucugaguu

SEQ ID NO: 3318 - RNA, 19 nt, Artificial Sequence
  Description of Artificial Sequence: Synthetic oligonucleotide
ucucccugaagccaggcac

SEQ ID NO: 3319 - RNA, 19 nt, Artificial Sequence
  Description of Artificial Sequence: Synthetic oligonucleotide
cugugcugccgccuccacc

SEQ ID NO: 3320 - RNA, 19 nt, Artificial Sequence
  Description of Artificial Sequence: Synthetic oligonucleotide
cuuacagacaccggaauac

SEQ ID NO: 3321 - RNA, 19 nt, Artificial Sequence
  Description of Artificial Sequence: Synthetic oligonucleotide
cugugguguaagcucaguu

SEQ ID NO: 3322 - RNA, 19 nt, Artificial Sequence
  Description of Artificial Sequence: Synthetic oligonucleotide
ugugguuuuuuagguggag

SEQ ID NO: 3323 - RNA, 19 nt, Artificial Sequence
  Description of Artificial Sequence: Synthetic oligonucleotide
gagacacaccugcuccaau

SEQ ID NO: 3324 - RNA, 19 nt, Artificial Sequence
  Description of Artificial Sequence: Synthetic oligonucleotide
uuuccccaccccccucucu

SEQ ID NO: 3325 - RNA, 19 nt, Artificial Sequence
  Description of Artificial Sequence: Synthetic oligonucleotide
uuucucugguggucuuccu

SEQ ID NO: 3326 - RNA, 19 nt, Artificial Sequence
  Description of Artificial Sequence: Synthetic oligonucleotide
uucuaccccaaggccagua

SEQ ID NO: 3327 - RNA, 19 nt, Artificial Sequence
  Description of Artificial Sequence: Synthetic oligonucleotide
aguuuugacacuucccagu

SEQ ID NO: 3328 - RNA, 19 nt, Artificial Sequence
  Description of Artificial Sequence: Synthetic oligonucleotide
uggaagauacagagaugca

SEQ ID NO: 3329 - RNA, 19 nt, Artificial Sequence
  Description of Artificial Sequence: Synthetic oligonucleotide
aaugauaguuaugugcuua

SEQ ID NO: 3330 - RNA, 19 nt, Artificial Sequence
  Description of Artificial Sequence: Synthetic oligonucleotide
accuaacuugaacauuaga

SEQ ID NO: 3331 - RNA, 19 nt, Artificial Sequence
  Description of Artificial Sequence: Synthetic oligonucleotide
agggaaagacugaaagaga

SEQ ID NO: 3332 - RNA, 19 nt, Artificial Sequence
  Description of Artificial Sequence: Synthetic oligonucleotide
aaagauaggaggaaccaca

SEQ ID NO: 3333 - RNA, 19 nt, Artificial Sequence
  Description of Artificial Sequence: Synthetic oligonucleotide
aauguuucuucauuucucu

SEQ ID NO: 3334 - RNA, 19 nt, Artificial Sequence
  Description of Artificial Sequence: Synthetic oligonucleotide
ugcauggguuggucaggag

SEQ ID NO: 3335 - RNA, 19 nt, Artificial Sequence
  Description of Artificial Sequence: Synthetic oligonucleotide
gaaugaaacagcuagagaa

SEQ ID NO: 3336 - RNA, 19 nt, Artificial Sequence
  Description of Artificial Sequence: Synthetic oligonucleotide
aggaccagaaaauguaagg

SEQ ID NO: 3337 - RNA, 19 nt, Artificial Sequence
  Description of Artificial Sequence: Synthetic oligonucleotide
gcaaugcugccuacuauca

SEQ ID NO: 3338 - RNA, 19 nt, Artificial Sequence
  Description of Artificial Sequence: Synthetic oligonucleotide
aaacuagcugucacuuuuu

SEQ ID NO: 3339 - RNA, 19 nt, Artificial Sequence
  Description of Artificial Sequence: Synthetic oligonucleotide
uuucuuuuucuuuuucuuu

SEQ ID NO: 3340 - RNA, 19 nt, Artificial Sequence
  Description of Artificial Sequence: Synthetic oligonucleotide
ucuuuguuucuuucuuccu

SEQ ID NO: 3341 - RNA, 19 nt, Artificial Sequence
  Description of Artificial Sequence: Synthetic oligonucleotide
uuuuuaaagcagaugguug

SEQ ID NO: 3342 - RNA, 19 nt, Artificial Sequence
  Description of Artificial Sequence: Synthetic oligonucleotide
gaaacacccaugcuaucug

SEQ ID NO: 3343 - RNA, 19 nt, Artificial Sequence
  Description of Artificial Sequence: Synthetic oligonucleotide
guuccuaucugcaggaacu

SEQ ID NO: 3344 - RNA, 19 nt, Artificial Sequence
  Description of Artificial Sequence: Synthetic oligonucleotide
ugaugugugcauauuuagc

SEQ ID NO: 3345 - RNA, 19 nt, Artificial Sequence
  Description of Artificial Sequence: Synthetic oligonucleotide
caucccuggaaaucauaau

SEQ ID NO: 3346 - RNA, 19 nt, Artificial Sequence
  Description of Artificial Sequence: Synthetic oligonucleotide
uaaaguuuccauuagaaca

SEQ ID NO: 3347 - RNA, 19 nt, Artificial Sequence
  Description of Artificial Sequence: Synthetic oligonucleotide
aaaagaauaacauuuucua

SEQ ID NO: 3348 - RNA, 19 nt, Artificial Sequence
  Description of Artificial Sequence: Synthetic oligonucleotide
auaacauaugauggugucu

SEQ ID NO: 3349 - RNA, 19 nt, Artificial Sequence
  Description of Artificial Sequence: Synthetic oligonucleotide
ugaaauugagaauccaguu

SEQ ID NO: 3350 - RNA, 19 nt, Artificial Sequence
  Description of Artificial Sequence: Synthetic oligonucleotide
uucuuuccccagcaguuuc

SEQ ID NO: 3351 - RNA, 19 nt, Artificial Sequence
  Description of Artificial Sequence: Synthetic oligonucleotide
cuguccuagcaaguaagaa

SEQ ID NO: 3352 - RNA, 19 nt, Artificial Sequence
  Description of Artificial Sequence: Synthetic oligonucleotide
auggccaacucaacuuuca

SEQ ID NO: 3353 - RNA, 19 nt, Artificial Sequence
  Description of Artificial Sequence: Synthetic oligonucleotide
auaauuuaaaaaucuccau

SEQ ID NO: 3354 - RNA, 19 nt, Artificial Sequence
  Description of Artificial Sequence: Synthetic oligonucleotide
uuaaaguuauaacuaguaa

SEQ ID NO: 3355 - RNA, 19 nt, Artificial Sequence
  Description of Artificial Sequence: Synthetic oligonucleotide
auuauguuuucaacacuuu

SEQ ID NO: 3356 - RNA, 19 nt, Artificial Sequence
  Description of Artificial Sequence: Synthetic oligonucleotide
uuugguuuuuuucauuuug

SEQ ID NO: 3357 - RNA, 19 nt, Artificial Sequence
  Description of Artificial Sequence: Synthetic oligonucleotide
guuuugcucugaccgauuc

SEQ ID NO: 3358 - RNA, 19 nt, Artificial Sequence
  Description of Artificial Sequence: Synthetic oligonucleotide
ccuuuauauuugcuccccu

SEQ ID NO: 3359 - RNA, 19 nt, Artificial Sequence
  Description of Artificial Sequence: Synthetic oligonucleotide
uauuuuuggcuuuaauuuc

SEQ ID NO: 3360 - RNA, 19 nt, Artificial Sequence
  Description of Artificial Sequence: Synthetic oligonucleotide
cuaauugcaaagauguuua

SEQ ID NO: 3361 - RNA, 19 nt, Artificial Sequence
  Description of Artificial Sequence: Synthetic oligonucleotide
acaucaaagcuucuucaca

SEQ ID NO: 3362 - RNA, 19 nt, Artificial Sequence
  Description of Artificial Sequence: Synthetic oligonucleotide
agaauuuaagcaagaaaua

SEQ ID NO: 3363 - RNA, 19 nt, Artificial Sequence
  Description of Artificial Sequence: Synthetic oligonucleotide
auuuuaauauagugaaaug

SEQ ID NO: 3364 - RNA, 19 nt, Artificial Sequence
  Description of Artificial Sequence: Synthetic oligonucleotide
ggccacuacuuuaaguaua

SEQ ID NO: 3365 - RNA, 19 nt, Artificial Sequence
  Description of Artificial Sequence: Synthetic oligonucleotide
acaaucuuuaaaauaagaa

SEQ ID NO: 3366 - RNA, 19 nt, Artificial Sequence
  Description of Artificial Sequence: Synthetic oligonucleotide
aagggaggcuaauauuuuu

SEQ ID NO: 3367 - RNA, 19 nt, Artificial Sequence
  Description of Artificial Sequence: Synthetic oligonucleotide
ucaugcuaucaaauuaucu

SEQ ID NO: 3368 - RNA, 19 nt, Artificial Sequence
  Description of Artificial Sequence: Synthetic oligonucleotide
uucacccucauccuuuaca

SEQ ID NO: 3369 - RNA, 19 nt, Artificial Sequence
  Description of Artificial Sequence: Synthetic oligonucleotide
auuuuucaacauuuuuuuu

SEQ ID NO: 3370 - RNA, 19 nt, Artificial Sequence
  Description of Artificial Sequence: Synthetic oligonucleotide
uucuccauaaaugacacua

SEQ ID NO: 3371 - RNA, 19 nt, Artificial Sequence
  Description of Artificial Sequence: Synthetic oligonucleotide
acuugauaggccguugguu

SEQ ID NO: 3372 - RNA, 19 nt, Artificial Sequence
  Description of Artificial Sequence: Synthetic oligonucleotide
ugucugaagaguagaaggg

SEQ ID NO: 3373 - RNA, 19 nt, Artificial Sequence
  Description of Artificial Sequence: Synthetic oligonucleotide
gaaacuaagagacaguucu

SEQ ID NO: 3374 - RNA, 19 nt, Artificial Sequence
  Description of Artificial Sequence: Synthetic oligonucleotide
ucugugguucaggaaaacu

SEQ ID NO: 3375 - RNA, 19 nt, Artificial Sequence
  Description of Artificial Sequence: Synthetic oligonucleotide
uacugauacuuucaggggu

SEQ ID NO: 3376 - RNA, 19 nt, Artificial Sequence
  Description of Artificial Sequence: Synthetic oligonucleotide
uggcccaaugagggaaucc

SEQ ID NO: 3377 - RNA, 19 nt, Artificial Sequence
  Description of Artificial Sequence: Synthetic oligonucleotide
cauugaacuggaagaaaca

SEQ ID NO: 3378 - RNA, 19 nt, Artificial Sequence
  Description of Artificial Sequence: Synthetic oligonucleotide
acacuggauuggguauguc

SEQ ID NO: 3379 - RNA, 19 nt, Artificial Sequence
  Description of Artificial Sequence: Synthetic oligonucleotide
cuaccuggcagauacucag

SEQ ID NO: 3380 - RNA, 19 nt, Artificial Sequence
  Description of Artificial Sequence: Synthetic oligonucleotide
gaaauguaguuugcacuua

SEQ ID NO: 3381 - RNA, 19 nt, Artificial Sequence
  Description of Artificial Sequence: Synthetic oligonucleotide
aagcuguaauuuuauuugu

SEQ ID NO: 3382 - RNA, 19 nt, Artificial Sequence
  Description of Artificial Sequence: Synthetic oligonucleotide
uucuuuuucugaacuccau

SEQ ID NO: 3383 - RNA, 19 nt, Artificial Sequence
  Description of Artificial Sequence: Synthetic oligonucleotide
uuuuggauuuugaaucaag

SEQ ID NO: 3384 - RNA, 19 nt, Artificial Sequence
  Description of Artificial Sequence: Synthetic oligonucleotide
gcaauauggaagcaaccag

SEQ ID NO: 3385 - RNA, 19 nt, Artificial Sequence
  Description of Artificial Sequence: Synthetic oligonucleotide
gcaaauuaacuaauuuaag

SEQ ID NO: 3386 - RNA, 19 nt, Artificial Sequence
  Description of Artificial Sequence: Synthetic oligonucleotide
guacauuuuuaaaaaaaga

SEQ ID NO: 3387 - RNA, 19 nt, Artificial Sequence
  Description of Artificial Sequence: Synthetic oligonucleotide
agcuaagauaaagacugug

SEQ ID NO: 3388 - RNA, 19 nt, Artificial Sequence
  Description of Artificial Sequence: Synthetic oligonucleotide
ggaaaugccaaaccaagca

SEQ ID NO: 3389 - RNA, 19 nt, Artificial Sequence
  Description of Artificial Sequence: Synthetic oligonucleotide
aaauuaggaaccuugcaac

SEQ ID NO: 3390 - RNA, 19 nt, Artificial Sequence
  Description of Artificial Sequence: Synthetic oligonucleotide
cgguauccagggacuauga

SEQ ID NO: 3391 - RNA, 19 nt, Artificial Sequence
  Description of Artificial Sequence: Synthetic oligonucleotide
augagaggccagcacauua

SEQ ID NO: 3392 - RNA, 19 nt, Artificial Sequence
  Description of Artificial Sequence: Synthetic oligonucleotide
aucuucauaugucaccuuu

SEQ ID NO: 3393 - RNA, 19 nt, Artificial Sequence
  Description of Artificial Sequence: Synthetic oligonucleotide
ugcuacgcaaggaaauuug

SEQ ID NO: 3394 - RNA, 19 nt, Artificial Sequence
  Description of Artificial Sequence: Synthetic oligonucleotide
guucaguucguauacuucg

SEQ ID NO: 3395 - RNA, 19 nt, Artificial Sequence
  Description of Artificial Sequence: Synthetic oligonucleotide
guaagaaggaaugcgagua

SEQ ID NO: 3396 - RNA, 19 nt, Artificial Sequence
  Description of Artificial Sequence: Synthetic oligonucleotide
aaggauuggcuugaauucc

SEQ ID NO: 3397 - RNA, 19 nt, Artificial Sequence
  Description of Artificial Sequence: Synthetic oligonucleotide
cauggaauuucuaguauga

SEQ ID NO: 3398 - RNA, 19 nt, Artificial Sequence
  Description of Artificial Sequence: Synthetic oligonucleotide
agacuauuuauaugaagua

SEQ ID NO: 3399 - RNA, 19 nt, Artificial Sequence
  Description of Artificial Sequence: Synthetic oligonucleotide
agaagguaacucuuugcac

SEQ ID NO: 3400 - RNA, 19 nt, Artificial Sequence
  Description of Artificial Sequence: Synthetic oligonucleotide
cauaaauugguauaauaaa

SEQ ID NO: 3401 - RNA, 19 nt, Artificial Sequence
  Description of Artificial Sequence: Synthetic oligonucleotide
aaagaaaaacacaaacauu

SEQ ID NO: 3402 - RNA, 19 nt, Artificial Sequence
  Description of Artificial Sequence: Synthetic oligonucleotide
ucaaagcuuagggauaggu

SEQ ID NO: 3403 - RNA, 19 nt, Artificial Sequence
  Description of Artificial Sequence: Synthetic oligonucleotide
uccuugggucaaaaguugu

SEQ ID NO: 3404 - RNA, 19 nt, Artificial Sequence
  Description of Artificial Sequence: Synthetic oligonucleotide
uaaauaaaugugaaacauc

SEQ ID NO: 3405 - RNA, 19 nt, Artificial Sequence
  Description of Artificial Sequence: Synthetic oligonucleotide
cuucucaugcaauuauuuu

SEQ ID NO: 3406 - RNA, 19 nt, Artificial Sequence
  Description of Artificial Sequence: Synthetic oligonucleotide
uauuauccaacacacuaau

SEQ ID NO: 3407 - RNA, 19 nt, Artificial Sequence
  Description of Artificial Sequence: Synthetic oligonucleotide
ucuuuugauacuuuauaua

SEQ ID NO: 3408 - RNA, 19 nt, Artificial Sequence
  Description of Artificial Sequence: Synthetic oligonucleotide
aauucccuuucuucauaua

SEQ ID NO: 3409 - RNA, 19 nt, Artificial Sequence
  Description of Artificial Sequence: Synthetic oligonucleotide
acugcauccaguacuagaa

SEQ ID NO: 3410 - RNA, 19 nt, Artificial Sequence
  Description of Artificial Sequence: Synthetic oligonucleotide
accaucauuauuauguauc

SEQ ID NO: 3411 - RNA, 19 nt, Artificial Sequence
  Description of Artificial Sequence: Synthetic oligonucleotide
cauuuugaaagaauaccug

SEQ ID NO: 3412 - RNA, 19 nt, Artificial Sequence
  Description of Artificial Sequence: Synthetic oligonucleotide
gaugagaugaaggaugaga

SEQ ID NO: 3413 - RNA, 19 nt, Artificial Sequence
  Description of Artificial Sequence: Synthetic oligonucleotide
aacaaaugacagagaugag

SEQ ID NO: 3414 - RNA, 19 nt, Artificial Sequence
  Description of Artificial Sequence: Synthetic oligonucleotide
gucuccaaguaaagggggc

SEQ ID NO: 3415 - RNA, 19 nt, Artificial Sequence
  Description of Artificial Sequence: Synthetic oligonucleotide
ccucacaucaauaauuagg

SEQ ID NO: 3416 - RNA, 19 nt, Artificial Sequence
  Description of Artificial Sequence: Synthetic oligonucleotide
gaaacuuagauauaagucg

SEQ ID NO: 3417 - RNA, 19 nt, Artificial Sequence
  Description of Artificial Sequence: Synthetic oligonucleotide
gcccuuuucugaaaauucu

SEQ ID NO: 3418 - RNA, 19 nt, Artificial Sequence
  Description of Artificial Sequence: Synthetic oligonucleotide
uaccccaagucauuuagau

SEQ ID NO: 3419 - RNA, 19 nt, Artificial Sequence
  Description of Artificial Sequence: Synthetic oligonucleotide
uuuuuaaaaaauauuucua

SEQ ID NO: 3420 - RNA, 19 nt, Artificial Sequence
  Description of Artificial Sequence: Synthetic oligonucleotide
aauguuaaaauauugggac

SEQ ID NO: 3421 - RNA, 19 nt, Artificial Sequence
  Description of Artificial Sequence: Synthetic oligonucleotide
ccaaauuagaaucaauagu

SEQ ID NO: 3422 - RNA, 19 nt, Artificial Sequence
  Description of Artificial Sequence: Synthetic oligonucleotide
uauaagauuaauuaauuag

SEQ ID NO: 3423 - RNA, 19 nt, Artificial Sequence
  Description of Artificial Sequence: Synthetic oligonucleotide
gaguaaaaauaucuauuaa

SEQ ID NO: 3424 - RNA, 19 nt, Artificial Sequence
  Description of Artificial Sequence: Synthetic oligonucleotide
aggcagagaaaguuuagag

SEQ ID NO: 3425 - RNA, 19 nt, Artificial Sequence
  Description of Artificial Sequence: Synthetic oligonucleotide
gaaaaaaauccaaagaaau

SEQ ID NO: 3426 - RNA, 19 nt, Artificial Sequence
  Description of Artificial Sequence: Synthetic oligonucleotide
uuuguguuucuuccuauuc

SEQ ID NO: 3427 - RNA, 19 nt, Artificial Sequence
  Description of Artificial Sequence: Synthetic oligonucleotide
cugaacaaguaaauccauc

SEQ ID NO: 3428 - RNA, 19 nt, Artificial Sequence
  Description of Artificial Sequence: Synthetic oligonucleotide
ccauccauccauccaaacc

SEQ ID NO: 3429 - RNA, 19 nt, Artificial Sequence
  Description of Artificial Sequence: Synthetic oligonucleotide
cuccuuuaucuaacugugu

SEQ ID NO: 3430 - RNA, 19 nt, Artificial Sequence
  Description of Artificial Sequence: Synthetic oligonucleotide
ucuacuaaaagcaccaugu

SEQ ID NO: 3431 - RNA, 19 nt, Artificial Sequence
  Description of Artificial Sequence: Synthetic oligonucleotide
uuuuguggggaacacucag

SEQ ID NO: 3432 - RNA, 19 nt, Artificial Sequence
  Description of Artificial Sequence: Synthetic oligonucleotide
gauaaauggaauaucaucc

SEQ ID NO: 3433 - RNA, 19 nt, Artificial Sequence
  Description of Artificial Sequence: Synthetic oligonucleotide
cucaacuucaaaauucuau

SEQ ID NO: 3434 - RNA, 19 nt, Artificial Sequence
  Description of Artificial Sequence: Synthetic oligonucleotide
ugaucuaggagauuuaauu

SEQ ID NO: 3435 - RNA, 19 nt, Artificial Sequence
  Description of Artificial Sequence: Synthetic oligonucleotide
uaaaaugacauuuuaauuu

SEQ ID NO: 3436 - RNA, 19 nt, Artificial Sequence
  Description of Artificial Sequence: Synthetic oligonucleotide
uuucuaugcguuccaacaa

SEQ ID NO: 3437 - RNA, 19 nt, Artificial Sequence
  Description of Artificial Sequence: Synthetic oligonucleotide
aucagauugcauagucucu

SEQ ID NO: 3438 - RNA, 19 nt, Artificial Sequence
  Description of Artificial Sequence: Synthetic oligonucleotide
uuuugugaauagcugucau

SEQ ID NO: 3439 - RNA, 19 nt, Artificial Sequence
  Description of Artificial Sequence: Synthetic oligonucleotide
uauaaucaguuguacugua

SEQ ID NO: 3440 - RNA, 19 nt, Artificial Sequence
  Description of Artificial Sequence: Synthetic oligonucleotide
aagauaucuccuuuaaacu

SEQ ID NO: 3441 - RNA, 19 nt, Artificial Sequence
  Description of Artificial Sequence: Synthetic oligonucleotide
ucauuugggauauaaguua

SEQ ID NO: 3442 - RNA, 19 nt, Artificial Sequence
  Description of Artificial Sequence: Synthetic oligonucleotide
aaacauccuucaaauuguu

SEQ ID NO: 3443 - RNA, 19 nt, Artificial Sequence
  Description of Artificial Sequence: Synthetic oligonucleotide
ugauguugacaaacaggau

SEQ ID NO: 3444 - RNA, 19 nt, Artificial Sequence
  Description of Artificial Sequence: Synthetic oligonucleotide
uaauuucaauaauauuauu

SEQ ID NO: 3445 - RNA, 19 nt, Artificial Sequence
  Description of Artificial Sequence: Synthetic oligonucleotide
ucaaacauaaacuggucua

SEQ ID NO: 3446 - RNA, 19 nt, Artificial Sequence
  Description of Artificial Sequence: Synthetic oligonucleotide
aggagaauauugcaucacu

SEQ ID NO: 3447 - RNA, 19 nt, Artificial Sequence
  Description of Artificial Sequence: Synthetic oligonucleotide
ugacuaauuagccuaucua

SEQ ID NO: 3448 - RNA, 19 nt, Artificial Sequence
  Description of Artificial Sequence: Synthetic oligonucleotide
agagucuaacuucaccauu

SEQ ID NO: 3449 - RNA, 19 nt, Artificial Sequence
  Description of Artificial Sequence: Synthetic oligonucleotide
uaaaccaaaagcagauggu

SEQ ID NO: 3450 - RNA, 19 nt, Artificial Sequence
  Description of Artificial Sequence: Synthetic oligonucleotide
ugguccuuggccaagaaua

SEQ ID NO: 3451 - RNA, 19 nt, Artificial Sequence
  Description of Artificial Sequence: Synthetic oligonucleotide
auuggagacauuggaguug

SEQ ID NO: 3452 - RNA, 19 nt, Artificial Sequence
  Description of Artificial Sequence: Synthetic oligonucleotide
gguuuuuuucuaagcuaua

SEQ ID NO: 3453 - RNA, 19 nt, Artificial Sequence
  Description of Artificial Sequence: Synthetic oligonucleotide
aagaagugaggcgagcuga

SEQ ID NO: 3454 - RNA, 19 nt, Artificial Sequence
  Description of Artificial Sequence: Synthetic oligonucleotide
aaaaaguaugguagagcag

SEQ ID NO: 3455 - RNA, 19 nt, Artificial Sequence
  Description of Artificial Sequence: Synthetic oligonucleotide
ggagaaggguuugugagau

SEQ ID NO: 3456 - RNA, 19 nt, Artificial Sequence
  Description of Artificial Sequence: Synthetic oligonucleotide
uuccuucuagugaaguuca

SEQ ID NO: 3457 - RNA, 19 nt, Artificial Sequence
  Description of Artificial Sequence: Synthetic oligonucleotide
acccucaaacuuuucaggg

SEQ ID NO: 3458 - RNA, 19 nt, Artificial Sequence
  Description of Artificial Sequence: Synthetic oligonucleotide
gguaaagacacagagugau

SEQ ID NO: 3459 - RNA, 19 nt, Artificial Sequence
  Description of Artificial Sequence: Synthetic oligonucleotide
uucaggggccacaaucuaa

SEQ ID NO: 3460 - RNA, 19 nt, Artificial Sequence
  Description of Artificial Sequence: Synthetic oligonucleotide
auagcucagggcucuccua

SEQ ID NO: 3461 - RNA, 19 nt, Artificial Sequence
  Description of Artificial Sequence: Synthetic oligonucleotide
auccauucagagaagucuc

SEQ ID NO: 3462 - RNA, 19 nt, Artificial Sequence
  Description of Artificial Sequence: Synthetic oligonucleotide
cuaggaaaagggaucucau

SEQ ID NO: 3463 - RNA, 19 nt, Artificial Sequence
  Description of Artificial Sequence: Synthetic oligonucleotide
uaucaguacuuaugaaaaa

SEQ ID NO: 3464 - RNA, 19 nt, Artificial Sequence
  Description of Artificial Sequence: Synthetic oligonucleotide
auugaauauaagccucccu

SEQ ID NO: 3465 - RNA, 19 nt, Artificial Sequence
  Description of Artificial Sequence: Synthetic oligonucleotide
uuucuaaauaaaucugcau

SEQ ID NO: 3466 - RNA, 19 nt, Artificial Sequence
  Description of Artificial Sequence: Synthetic oligonucleotide
ucgagucaucacagcccuc

SEQ ID NO: 3467 - RNA, 19 nt, Artificial Sequence
  Description of Artificial Sequence: Synthetic oligonucleotide
cuuuuuggauacuauaccu

SEQ ID NO: 3468 - RNA, 19 nt, Artificial Sequence
  Description of Artificial Sequence: Synthetic oligonucleotide
uuuacaauaugcauauggu

SEQ ID NO: 3469 - RNA, 19 nt, Artificial Sequence
  Description of Artificial Sequence: Synthetic oligonucleotide
uuucuacugggcuauagaa

SEQ ID NO: 3470 - RNA, 19 nt, Artificial Sequence
  Description of Artificial Sequence: Synthetic oligonucleotide
aagcagaaucacucauuuu

SEQ ID NO: 3471 - RNA, 19 nt, Artificial Sequence
  Description of Artificial Sequence: Synthetic oligonucleotide
uggagaaggaaaaaaugaa

SEQ ID NO: 3472 - RNA, 19 nt, Artificial Sequence
  Description of Artificial Sequence: Synthetic oligonucleotide
auaguuaaaacaaacuuuu

SEQ ID NO: 3473 - RNA, 19 nt, Artificial Sequence
  Description of Artificial Sequence: Synthetic oligonucleotide
uaacuguuaagguaacaga

SEQ ID NO: 3474 - RNA, 19 nt, Artificial Sequence
  Description of Artificial Sequence: Synthetic oligonucleotide
aaauguauuuagugaaugu

SEQ ID NO: 3475 - RNA, 19 nt, Artificial Sequence
  Description of Artificial Sequence: Synthetic oligonucleotide
ucucuuuccuccuaagaac

SEQ ID NO: 3476 - RNA, 19 nt, Artificial Sequence
  Description of Artificial Sequence: Synthetic oligonucleotide
cacaagacuucuacauguu

SEQ ID NO: 3477 - RNA, 19 nt, Artificial Sequence
  Description of Artificial Sequence: Synthetic oligonucleotide
uggguaauaccuagagaug

SEQ ID NO: 3478 - RNA, 19 nt, Artificial Sequence
  Description of Artificial Sequence: Synthetic oligonucleotide
gcauguaggaauaauccaa

SEQ ID NO: 3479 - RNA, 19 nt, Artificial Sequence
  Description of Artificial Sequence: Synthetic oligonucleotide
aaaugacccaaaugcuuua

SEQ ID NO: 3480 - RNA, 19 nt, Artificial Sequence
  Description of Artificial Sequence: Synthetic oligonucleotide
auaauagcaccacuuuaua

SEQ ID NO: 3481 - RNA, 19 nt, Artificial Sequence
  Description of Artificial Sequence: Synthetic oligonucleotide
aauucuuuugaaugauuuc

SEQ ID NO: 3482 - RNA, 19 nt, Artificial Sequence
  Description of Artificial Sequence: Synthetic oligonucleotide
cuguaguauauaauugacu

SEQ ID NO: 3483 - RNA, 19 nt, Artificial Sequence
  Description of Artificial Sequence: Synthetic oligonucleotide
uucaguuguuugaguguuu

SEQ ID NO: 3484 - RNA, 19 nt, Artificial Sequence
  Description of Artificial Sequence: Synthetic oligonucleotide
uuuuguuuuauuuuugucc

SEQ ID NO: 3485 - RNA, 19 nt, Artificial Sequence
  Description of Artificial Sequence: Synthetic oligonucleotide
cccccugggaaaacauauu

SEQ ID NO: 3486 - RNA, 19 nt, Artificial Sequence
  Description of Artificial Sequence: Synthetic oligonucleotide
uucagcauguauaagaggg

SEQ ID NO: 3487 - RNA, 19 nt, Artificial Sequence
  Description of Artificial Sequence: Synthetic oligonucleotide
gagaaaaaaaguuucauuc

SEQ ID NO: 3488 - RNA, 19 nt, Artificial Sequence
  Description of Artificial Sequence: Synthetic oligonucleotide
ccuuccagagaauaacuua

SEQ ID NO: 3489 - RNA, 19 nt, Artificial Sequence
  Description of Artificial Sequence: Synthetic oligonucleotide
auuuaguccaguaggguag

SEQ ID NO: 3490 - RNA, 19 nt, Artificial Sequence
  Description of Artificial Sequence: Synthetic oligonucleotide
gaauuuuaaaaugucaguu

SEQ ID NO: 3491 - RNA, 19 nt, Artificial Sequence
  Description of Artificial Sequence: Synthetic oligonucleotide
uaaagucuucaaagugcuu

SEQ ID NO: 3492 - RNA, 19 nt, Artificial Sequence
  Description of Artificial Sequence: Synthetic oligonucleotide
uggggggauaucagauucc

SEQ ID NO: 3493 - RNA, 19 nt, Artificial Sequence
  Description of Artificial Sequence: Synthetic oligonucleotide
cagaggccaauuguagcaa

SEQ ID NO: 3494 - RNA, 19 nt, Artificial Sequence
  Description of Artificial Sequence: Synthetic oligonucleotide
auugaaauuugcagaauca

SEQ ID NO: 3495 - RNA, 19 nt, Artificial Sequence
  Description of Artificial Sequence: Synthetic oligonucleotide
aauuauguaaaucugagac

SEQ ID NO: 3496 - RNA, 19 nt, Artificial Sequence
  Description of Artificial Sequence: Synthetic oligonucleotide
caaauuaguauuaaaauua

SEQ ID NO: 3497 - RNA, 19 nt, Artificial Sequence
  Description of Artificial Sequence: Synthetic oligonucleotide
acacggaguauauuuuuua

SEQ ID NO: 3498 - RNA, 19 nt, Artificial Sequence
  Description of Artificial Sequence: Synthetic oligonucleotide
aaaucacccaacuuuguag

SEQ ID NO: 3499 - RNA, 19 nt, Artificial Sequence
  Description of Artificial Sequence: Synthetic oligonucleotide
gauuauaccuauuuugggc

SEQ ID NO: 3500 - RNA, 19 nt, Artificial Sequence
  Description of Artificial Sequence: Synthetic oligonucleotide
cagguauggaaaaauuuug

SEQ ID NO: 3501 - RNA, 19 nt, Artificial Sequence
  Description of Artificial Sequence: Synthetic oligonucleotide
gcaguuaaaugauugccua

SEQ ID NO: 3502 - RNA, 19 nt, Artificial Sequence
  Description of Artificial Sequence: Synthetic oligonucleotide
aaagaaagugguaaacagg

SEQ ID NO: 3503 - RNA, 19 nt, Artificial Sequence
  Description of Artificial Sequence: Synthetic oligonucleotide
gugaggaaagauggccucu

SEQ ID NO: 3504 - RNA, 19 nt, Artificial Sequence
  Description of Artificial Sequence: Synthetic oligonucleotide
ugaucuaggauagauccag

SEQ ID NO: 3505 - RNA, 19 nt, Artificial Sequence
  Description of Artificial Sequence: Synthetic oligonucleotide
gaaccacaaagcaucugca

SEQ ID NO: 3506 - RNA, 19 nt, Artificial Sequence
  Description of Artificial Sequence: Synthetic oligonucleotide
accacaaaagguguuagac

SEQ ID NO: 3507 - RNA, 19 nt, Artificial Sequence
  Description of Artificial Sequence: Synthetic oligonucleotide
cuaccaagcagcuccuggu

SEQ ID NO: 3508 - RNA, 19 nt, Artificial Sequence
  Description of Artificial Sequence: Synthetic oligonucleotide
uuuucugcauaguauuagu

SEQ ID NO: 3509 - RNA, 19 nt, Artificial Sequence
  Description of Artificial Sequence: Synthetic oligonucleotide
uagcacagcuuaggaugag

SEQ ID NO: 3510 - RNA, 19 nt, Artificial Sequence
  Description of Artificial Sequence: Synthetic oligonucleotide
gaauccuuucuccaguaac

SEQ ID NO: 3511 - RNA, 19 nt, Artificial Sequence
  Description of Artificial Sequence: Synthetic oligonucleotide
cauucuuaaaauagcauga

SEQ ID NO: 3512 - RNA, 19 nt, Artificial Sequence
  Description of Artificial Sequence: Synthetic oligonucleotide
aaaaacaacgcaaaacuca

SEQ ID NO: 3513 - RNA, 19 nt, Artificial Sequence
  Description of Artificial Sequence: Synthetic oligonucleotide
aaauuucuauuaaaacaca

SEQ ID NO: 3514 - RNA, 19 nt, Artificial Sequence
  Description of Artificial Sequence: Synthetic oligonucleotide
acaaacuaaaaucaaguga

SEQ ID NO: 3515 - RNA, 19 nt, Artificial Sequence
  Description of Artificial Sequence: Synthetic oligonucleotide
auucuuuuuuguagauuag

SEQ ID NO: 3516 - RNA, 19 nt, Artificial Sequence
  Description of Artificial Sequence: Synthetic oligonucleotide
gggagaaggacugaauauc

SEQ ID NO: 3517 - RNA, 19 nt, Artificial Sequence
  Description of Artificial Sequence: Synthetic oligonucleotide
cuaauuuaagagaaggaau

SEQ ID NO: 3518 - RNA, 19 nt, Artificial Sequence
  Description of Artificial Sequence: Synthetic oligonucleotide
uaguguuuaaguguuauag

SEQ ID NO: 3519 - RNA, 19 nt, Artificial Sequence
  Description of Artificial Sequence: Synthetic oligonucleotide
gugugugagcuaauaccuu

SEQ ID NO: 3520 - RNA, 19 nt, Artificial Sequence
  Description of Artificial Sequence: Synthetic oligonucleotide
ucuaaaggaaagacauggc

SEQ ID NO: 3521 - RNA, 19 nt, Artificial Sequence
  Description of Artificial Sequence: Synthetic oligonucleotide
caugaagauugugcauacu

SEQ ID NO: 3522 - RNA, 19 nt, Artificial Sequence
  Description of Artificial Sequence: Synthetic oligonucleotide
uuacaaugcuaaggaaaaa

SEQ ID NO: 3523 - RNA, 19 nt, Artificial Sequence
  Description of Artificial Sequence: Synthetic oligonucleotide
aucaagaaaaggacugugu

SEQ ID NO: 3524 - RNA, 19 nt, Artificial Sequence
  Description of Artificial Sequence: Synthetic oligonucleotide
ugaggcucugcuacuagau

SEQ ID NO: 3525 - RNA, 19 nt, Artificial Sequence
  Description of Artificial Sequence: Synthetic oligonucleotide
ugaaguuggaaggacuauu

SEQ ID NO: 3526 - RNA, 19 nt, Artificial Sequence
  Description of Artificial Sequence: Synthetic oligonucleotide
uaaugugcuucuugaagua

SEQ ID NO: 3527 - RNA, 19 nt, Artificial Sequence
  Description of Artificial Sequence: Synthetic oligonucleotide
aucaaaaaugaaaagaaaa

SEQ ID NO: 3528 - RNA, 19 nt, Artificial Sequence
  Description of Artificial Sequence: Synthetic oligonucleotide
auuaaaauuguuuaagccu

SEQ ID NO: 3529 - RNA, 19 nt, Artificial Sequence
  Description of Artificial Sequence: Synthetic oligonucleotide
ugacagggaaggauguaaa

SEQ ID NO: 3530 - RNA, 19 nt, Artificial Sequence
  Description of Artificial Sequence: Synthetic oligonucleotide
auacaaguuuuucuagagc

SEQ ID NO: 3531 - RNA, 19 nt, Artificial Sequence
  Description of Artificial Sequence: Synthetic oligonucleotide
cucucuaaccuuuauuuca

SEQ ID NO: 3532 - RNA, 19 nt, Artificial Sequence
  Description of Artificial Sequence: Synthetic oligonucleotide
aaaacuggaauuauucauc

SEQ ID NO: 3533 - RNA, 19 nt, Artificial Sequence
  Description of Artificial Sequence: Synthetic oligonucleotide
ccaucuguaauuguugaua

SEQ ID NO: 3534 - RNA, 19 nt, Artificial Sequence
  Description of Artificial Sequence: Synthetic oligonucleotide
aauuuaacuaguauaugua

SEQ ID NO: 3535 - RNA, 19 nt, Artificial Sequence
  Description of Artificial Sequence: Synthetic oligonucleotide
aguucauaagguaauagaa

SEQ ID NO: 3536 - RNA, 19 nt, Artificial Sequence
  Description of Artificial Sequence: Synthetic oligonucleotide
aaaggugaucaugaaagca

SEQ ID NO: 3537 - RNA, 19 nt, Artificial Sequence
  Description of Artificial Sequence: Synthetic oligonucleotide
auguauauaacuggacaga

SEQ ID NO: 3538 - RNA, 19 nt, Artificial Sequence
  Description of Artificial Sequence: Synthetic oligonucleotide
aaccacgauaaugcuauaa

SEQ ID NO: 3539 - RNA, 19 nt, Artificial Sequence
  Description of Artificial Sequence: Synthetic oligonucleotide
agauguagauuuaguuagg

SEQ ID NO: 3540 - RNA, 19 nt, Artificial Sequence
  Description of Artificial Sequence: Synthetic oligonucleotide
guuaucagauguuaaauga

SEQ ID NO: 3541 - RNA, 19 nt, Artificial Sequence
  Description of Artificial Sequence: Synthetic oligonucleotide
auuuuaauauuauuaaaua

SEQ ID NO: 3542 - RNA, 19 nt, Artificial Sequence
  Description of Artificial Sequence: Synthetic oligonucleotide
aaaucaaacuagaaaacua

SEQ ID NO: 3543 - RNA, 19 nt, Artificial Sequence
  Description of Artificial Sequence: Synthetic oligonucleotide
aaccacaaguauaauguaa

SEQ ID NO: 3544 - RNA, 19 nt, Artificial Sequence
  Description of Artificial Sequence: Synthetic oligonucleotide
acaaaguuaaaugcaggau

SEQ ID NO: 3545 - RNA, 19 nt, Artificial Sequence
  Description of Artificial Sequence: Synthetic oligonucleotide
uauaaaaauguaggaugga

SEQ ID NO: 3546 - RNA, 19 nt, Artificial Sequence
  Description of Artificial Sequence: Synthetic oligonucleotide
auuuugcauaguaaaaaga

SEQ ID NO: 3547 - RNA, 19 nt, Artificial Sequence
  Description of Artificial Sequence: Synthetic oligonucleotide
auaaguuugccauuuaaaa

SEQ ID NO: 3548 - RNA, 19 nt, Artificial Sequence
  Description of Artificial Sequence: Synthetic oligonucleotide
auuguuguuuguuggguuu

SEQ ID NO: 3549 - RNA, 19 nt, Artificial Sequence
  Description of Artificial Sequence: Synthetic oligonucleotide
uagcugaaaguaggcauau

SEQ ID NO: 3550 - RNA, 19 nt, Artificial Sequence
  Description of Artificial Sequence: Synthetic oligonucleotide
uaugguuccacuugggaaa

SEQ ID NO: 3551 - RNA, 19 nt, Artificial Sequence
  Description of Artificial Sequence: Synthetic oligonucleotide
aacuugcuuuaaagcauua

SEQ ID NO: 3552 - RNA, 19 nt, Artificial Sequence
  Description of Artificial Sequence: Synthetic oligonucleotide
acaaugaacaauuuuuucu

SEQ ID NO: 3553 - RNA, 19 nt, Artificial Sequence
  Description of Artificial Sequence: Synthetic oligonucleotide
ucauucucuuauuccuuua

SEQ ID NO: 3554 - RNA, 19 nt, Artificial Sequence
  Description of Artificial Sequence: Synthetic oligonucleotide
aucacuuuuuaaauguaaa

SEQ ID NO: 3555 - RNA, 19 nt, Artificial Sequence
  Description of Artificial Sequence: Synthetic oligonucleotide
agaaaauuguauuuauuua

SEQ ID NO: 3556 - RNA, 19 nt, Artificial Sequence
  Description of Artificial Sequence: Synthetic oligonucleotide
auuuuuuuaaauaaacacc

SEQ ID NO: 3557 - RNA, 19 nt, Artificial Sequence
  Description of Artificial Sequence: Synthetic oligonucleotide
caccuugcagaauuuaaua

SEQ ID NO: 3558 - RNA, 19 nt, Artificial Sequence
  Description of Artificial Sequence: Synthetic oligonucleotide
aggcaaacauguuacauau

SEQ ID NO: 3559 - RNA, 19 nt, Artificial Sequence
  Description of Artificial Sequence: Synthetic oligonucleotide
ugacuaaguaagggucuuc

SEQ ID NO: 3560 - RNA, 19 nt, Artificial Sequence
  Description of Artificial Sequence: Synthetic oligonucleotide
caagaugaaguaaagaaaa

SEQ ID NO: 3561 - RNA, 19 nt, Artificial Sequence
  Description of Artificial Sequence: Synthetic oligonucleotide
auguaaauguucuauuacc

SEQ ID NO: 3562 - RNA, 19 nt, Artificial Sequence
  Description of Artificial Sequence: Synthetic oligonucleotide
cuuaugcagagacaaaaaa

SEQ ID NO: 3563 - RNA, 19 nt, Artificial Sequence
  Description of Artificial Sequence: Synthetic oligonucleotide
aaaaaaggaguggugucau

SEQ ID NO: 3564 - RNA, 19 nt, Artificial Sequence
  Description of Artificial Sequence: Synthetic oligonucleotide
uuuagcuagcaaacaaaca

SEQ ID NO: 3565 - RNA, 19 nt, Artificial Sequence
  Description of Artificial Sequence: Synthetic oligonucleotide
aaaauacaguuaauuggug

SEQ ID NO: 3566 - RNA, 19 nt, Artificial Sequence
  Description of Artificial Sequence: Synthetic oligonucleotide
gauauguccuuucuuuucu

SEQ ID NO: 3567 - RNA, 19 nt, Artificial Sequence
  Description of Artificial Sequence: Synthetic oligonucleotide
ucacuaugcccucuugccu

SEQ ID NO: 3568 - RNA, 19 nt, Artificial Sequence
  Description of Artificial Sequence: Synthetic oligonucleotide
uccaaaaaugacaacaaag

SEQ ID NO: 3569 - RNA, 19 nt, Artificial Sequence
  Description of Artificial Sequence: Synthetic oligonucleotide
gaaucacaauuuuucugau

SEQ ID NO: 3570 - RNA, 19 nt, Artificial Sequence
  Description of Artificial Sequence: Synthetic oligonucleotide
uaaauaaaugcuaaaccaa

SEQ ID NO: 3571 - RNA, 19 nt, Artificial Sequence
  Description of Artificial Sequence: Synthetic oligonucleotide
agcguuucaaacuauugca

SEQ ID NO: 3572 - RNA, 19 nt, Artificial Sequence
  Description of Artificial Sequence: Synthetic oligonucleotide
auugccauucuuuuggacu

SEQ ID NO: 3573 - RNA, 19 nt, Artificial Sequence
  Description of Artificial Sequence: Synthetic oligonucleotide
uuuaguuauuagaaugaug

SEQ ID NO: 3574 - RNA, 19 nt, Artificial Sequence
  Description of Artificial Sequence: Synthetic oligonucleotide
gauuguuauagggcaaaug

SEQ ID NO: 3575 - RNA, 19 nt, Artificial Sequence
  Description of Artificial Sequence: Synthetic oligonucleotide
gagaaauccaugugcauca

SEQ ID NO: 3576 - RNA, 19 nt, Artificial Sequence
  Description of Artificial Sequence: Synthetic oligonucleotide
agcuucuaguuguuaaaaa

SEQ ID NO: 3577 - RNA, 19 nt, Artificial Sequence
  Description of Artificial Sequence: Synthetic oligonucleotide
aaaccagauaaauuaacuu

SEQ ID NO: 3578 - RNA, 19 nt, Artificial Sequence
  Description of Artificial Sequence: Synthetic oligonucleotide
ucuacuguauacugugggc

SEQ ID NO: 3579 - RNA, 19 nt, Artificial Sequence
  Description of Artificial Sequence: Synthetic oligonucleotide
cagaggauccuagagcuga

SEQ ID NO: 3580 - RNA, 19 nt, Artificial Sequence
  Description of Artificial Sequence: Synthetic oligonucleotide
auccuacaacaucagcuuc

SEQ ID NO: 3581 - RNA, 19 nt, Artificial Sequence
  Description of Artificial Sequence: Synthetic oligonucleotide
aaaagaaacagauaaauua

SEQ ID NO: 3582 - RNA, 19 nt, Artificial Sequence
  Description of Artificial Sequence: Synthetic oligonucleotide
aacuucuacuguauauacu

SEQ ID NO: 3583 - RNA, 19 nt, Artificial Sequence
  Description of Artificial Sequence: Synthetic oligonucleotide
ugugggcagaggaucuuac

SEQ ID NO: 3584 - RNA, 19 nt, Artificial Sequence
  Description of Artificial Sequence: Synthetic oligonucleotide
cugugccucuguuugugua

SEQ ID NO: 3585 - RNA, 19 nt, Artificial Sequence
  Description of Artificial Sequence: Synthetic oligonucleotide
acauggacuucggugugua

SEQ ID NO: 3586 - RNA, 19 nt, Artificial Sequence
  Description of Artificial Sequence: Synthetic oligonucleotide
aucaguuugaaggacagcc

SEQ ID NO: 3587 - RNA, 19 nt, Artificial Sequence
  Description of Artificial Sequence: Synthetic oligonucleotide
cuugccccauguaaacaua

SEQ ID NO: 3588 - RNA, 19 nt, Artificial Sequence
  Description of Artificial Sequence: Synthetic oligonucleotide
auaaaugcagauugguauc

SEQ ID NO: 3589 - RNA, 19 nt, Artificial Sequence
  Description of Artificial Sequence: Synthetic oligonucleotide
cgccugguugcuauuugcu

SEQ ID NO: 3590 - RNA, 19 nt, Artificial Sequence
  Description of Artificial Sequence: Synthetic oligonucleotide
uuaagaacaaauauuauac

SEQ ID NO: 3591 - RNA, 19 nt, Artificial Sequence
  Description of Artificial Sequence: Synthetic oligonucleotide
cagaugagaucaggcauaa

SEQ ID NO: 3592 - RNA, 19 nt, Artificial Sequence
  Description of Artificial Sequence: Synthetic oligonucleotide
auuuuaaaagaucauuauc

SEQ ID NO: 3593 - RNA, 19 nt, Artificial Sequence
  Description of Artificial Sequence: Synthetic oligonucleotide
caguggagaccucauuauu

SEQ ID NO: 3594 - RNA, 19 nt, Artificial Sequence
  Description of Artificial Sequence: Synthetic oligonucleotide
uacugauauuacaaugggg

SEQ ID NO: 3595 - RNA, 19 nt, Artificial Sequence
  Description of Artificial Sequence: Synthetic oligonucleotide
gccaguuuuuauacuucug

SEQ ID NO: 3596 - RNA, 19 nt, Artificial Sequence
  Description of Artificial Sequence: Synthetic oligonucleotide
ggguagaauuaauaaaauu

SEQ ID NO: 3597 - RNA, 19 nt, Artificial Sequence
  Description of Artificial Sequence: Synthetic oligonucleotide
uuuucugaucccagagauc

SEQ ID NO: 3598 - RNA, 19 nt, Artificial Sequence
  Description of Artificial Sequence: Synthetic oligonucleotide
cugaguucucucugcaguu

SEQ ID NO: 3599 - RNA, 19 nt, Artificial Sequence
  Description of Artificial Sequence: Synthetic oligonucleotide
uggaaacaagaagcuguug

SEQ ID NO: 3600 - RNA, 19 nt, Artificial Sequence
  Description of Artificial Sequence: Synthetic oligonucleotide
gugggcauugugucgggcc

SEQ ID NO: 3601 - RNA, 19 nt, Artificial Sequence
  Description of Artificial Sequence: Synthetic oligonucleotide
caggggcccuuguguuugu

SEQ ID NO: 3602 - RNA, 19 nt, Artificial Sequence
  Description of Artificial Sequence: Synthetic oligonucleotide
ugugggcaaauaucuuuua

SEQ ID NO: 3603 - RNA, 19 nt, Artificial Sequence
  Description of Artificial Sequence: Synthetic oligonucleotide
agcagugugagcugcuuuu

SEQ ID NO: 3604 - RNA, 19 nt, Artificial Sequence
  Description of Artificial Sequence: Synthetic oligonucleotide
uuucuuuucauuaaaaguc

SEQ ID NO: 3605 - RNA, 19 nt, Artificial Sequence
  Description of Artificial Sequence: Synthetic oligonucleotide
cucucuaaaauaauagaaa

SEQ ID NO: 3606 - RNA, 19 nt, Artificial Sequence
  Description of Artificial Sequence: Synthetic oligonucleotide
auuucagauacucgguuca

SEQ ID NO: 3607 - RNA, 19 nt, Artificial Sequence
  Description of Artificial Sequence: Synthetic oligonucleotide
aagucucacugauuuugua

SEQ ID NO: 3608 - RNA, 19 nt, Artificial Sequence
  Description of Artificial Sequence: Synthetic oligonucleotide
agagguccaaaaauguagg

SEQ ID NO: 3609 - RNA, 19 nt, Artificial Sequence
  Description of Artificial Sequence: Synthetic oligonucleotide
gaucugucacuuuugcagg

SEQ ID NO: 3610 - RNA, 19 nt, Artificial Sequence
  Description of Artificial Sequence: Synthetic oligonucleotide
gccccugccucaccuaauu

SEQ ID NO: 3611 - RNA, 19 nt, Artificial Sequence
  Description of Artificial Sequence: Synthetic oligonucleotide
uccuggccaggugacauuu

SEQ ID NO: 3612 - RNA, 19 nt, Artificial Sequence
  Description of Artificial Sequence: Synthetic oligonucleotide
uugggcagaaguaaaugcu

SEQ ID NO: 3613 - RNA, 19 nt, Artificial Sequence
  Description of Artificial Sequence: Synthetic oligonucleotide
uucuauagucacaagcuaa

SEQ ID NO: 3614 - RNA, 19 nt, Artificial Sequence
  Description of Artificial Sequence: Synthetic oligonucleotide
aaaugacucuaagccccaa

SEQ ID NO: 3615 - RNA, 19 nt, Artificial Sequence
  Description of Artificial Sequence: Synthetic oligonucleotide
auuucacgggggguauuca

SEQ ID NO: 3616 - RNA, 19 nt, Artificial Sequence
  Description of Artificial Sequence: Synthetic oligonucleotide
acaugcuuccucuggaaaa

SEQ ID NO: 3617 - RNA, 19 nt, Artificial Sequence
  Description of Artificial Sequence: Synthetic oligonucleotide
auacucuuugacagucagc

SEQ ID NO: 3618 - RNA, 19 nt, Artificial Sequence
  Description of Artificial Sequence: Synthetic oligonucleotide
cuuugcaaguaagugauua

SEQ ID NO: 3619 - RNA, 19 nt, Artificial Sequence
  Description of Artificial Sequence: Synthetic oligonucleotide
accuuguuaggaaucaaag

SEQ ID NO: 3620 - RNA, 19 nt, Artificial Sequence
  Description of Artificial Sequence: Synthetic oligonucleotide
gaaaaauguauuucucucu

SEQ ID NO: 3621 - RNA, 19 nt, Artificial Sequence
  Description of Artificial Sequence: Synthetic oligonucleotide
ugaccuuuagaggaaaaua

SEQ ID NO: 3622 - RNA, 19 nt, Artificial Sequence
  Description of Artificial Sequence: Synthetic oligonucleotide
agaauccuucccuuuuuug

SEQ ID NO: 3623 - RNA, 19 nt, Artificial Sequence
  Description of Artificial Sequence: Synthetic oligonucleotide
gcccauugacacaacuggc

SEQ ID NO: 3624 - RNA, 19 nt, Artificial Sequence
  Description of Artificial Sequence: Synthetic oligonucleotide
cacugcucucuucccuuuc

SEQ ID NO: 3625 - RNA, 19 nt, Artificial Sequence
  Description of Artificial Sequence: Synthetic oligonucleotide
cuaccacccugguucaaag

SEQ ID NO: 3626 - RNA, 19 nt, Artificial Sequence
  Description of Artificial Sequence: Synthetic oligonucleotide
guagucccccgaugcuguc

SEQ ID NO: 3627 - RNA, 19 nt, Artificial Sequence
  Description of Artificial Sequence: Synthetic oligonucleotide
ccuguuccuuucuuaagcc

SEQ ID NO: 3628 - RNA, 19 nt, Artificial Sequence
  Description of Artificial Sequence: Synthetic oligonucleotide
cauaguggaucucugagau

SEQ ID NO: 3629 - RNA, 19 nt, Artificial Sequence
  Description of Artificial Sequence: Synthetic oligonucleotide
uccuacaccccacuuugug

SEQ ID NO: 3630 - RNA, 19 nt, Artificial Sequence
  Description of Artificial Sequence: Synthetic oligonucleotide
gaaacacugacuucaucuu

SEQ ID NO: 3631 - RNA, 19 nt, Artificial Sequence
  Description of Artificial Sequence: Synthetic oligonucleotide
uugcccucgaaugccugau

SEQ ID NO: 3632 - RNA, 19 nt, Artificial Sequence
  Description of Artificial Sequence: Synthetic oligonucleotide
uuuuuucauaagagauucu

SEQ ID NO: 3633 - RNA, 19 nt, Artificial Sequence
  Description of Artificial Sequence: Synthetic oligonucleotide
uagcaauuuggacacuguu

SEQ ID NO: 3634 - RNA, 19 nt, Artificial Sequence
  Description of Artificial Sequence: Synthetic oligonucleotide
uuaagugaacuaucaaacu

SEQ ID NO: 3635 - RNA, 19 nt, Artificial Sequence
  Description of Artificial Sequence: Synthetic oligonucleotide
uaccgcauagagaauauuu

SEQ ID NO: 3636 - RNA, 19 nt, Artificial Sequence
  Description of Artificial Sequence: Synthetic oligonucleotide
uaagcuauuaaaauuaugg

SEQ ID NO: 3637 - RNA, 19 nt, Artificial Sequence
  Description of Artificial Sequence: Synthetic oligonucleotide
guuucccaugaagaucaau

SEQ ID NO: 3638 - RNA, 19 nt, Artificial Sequence
  Description of Artificial Sequence: Synthetic oligonucleotide
uucucuguguccuucccua

SEQ ID NO: 3639 - RNA, 19 nt, Artificial Sequence
  Description of Artificial Sequence: Synthetic oligonucleotide
auaggaauuugagacgagu

SEQ ID NO: 3640 - RNA, 19 nt, Artificial Sequence
  Description of Artificial Sequence: Synthetic oligonucleotide
uuagcccugugaugaaucu

SEQ ID NO: 3641 - RNA, 19 nt, Artificial Sequence
  Description of Artificial Sequence: Synthetic oligonucleotide
uugaaacucacauaugucc

SEQ ID NO: 3642 - RNA, 19 nt, Artificial Sequence
  Description of Artificial Sequence: Synthetic oligonucleotide
cacauacacuugguagaac

SEQ ID NO: 3643 - RNA, 19 nt, Artificial Sequence
  Description of Artificial Sequence: Synthetic oligonucleotide
cuucgauuuaaucuuuaca

SEQ ID NO: 3644 - RNA, 19 nt, Artificial Sequence
  Description of Artificial Sequence: Synthetic oligonucleotide
auaaaagcuguacauauaa

SEQ ID NO: 3645 - RNA, 19 nt, Artificial Sequence
  Description of Artificial Sequence: Synthetic oligonucleotide
accaagaaguuauuuuugc

SEQ ID NO: 3646 - RNA, 19 nt, Artificial Sequence
  Description of Artificial Sequence: Synthetic oligonucleotide
ccaguaaauuaacuuauuu

SEQ ID NO: 3647 - RNA, 19 nt, Artificial Sequence
  Description of Artificial Sequence: Synthetic oligonucleotide
ugcuuuauucaucuuauuu

SEQ ID NO: 3648 - RNA, 19 nt, Artificial Sequence
  Description of Artificial Sequence: Synthetic oligonucleotide
ugguuccuaaucguaaaua

SEQ ID NO: 3649 - RNA, 19 nt, Artificial Sequence
  Description of Artificial Sequence: Synthetic oligonucleotide
auuuuguagcugcuguaaa

SEQ ID NO: 3650 - RNA, 19 nt, Artificial Sequence
  Description of Artificial Sequence: Synthetic oligonucleotide
auuuuuuucucccaaauga

SEQ ID NO: 3651 - RNA, 19 nt, Artificial Sequence
  Description of Artificial Sequence: Synthetic oligonucleotide
aggagucuuauuaucauaa

SEQ ID NO: 3652 - RNA, 19 nt, Artificial Sequence
  Description of Artificial Sequence: Synthetic oligonucleotide
aagguaaaggcuauucagc

SEQ ID NO: 3653 - RNA, 19 nt, Artificial Sequence
  Description of Artificial Sequence: Synthetic oligonucleotide
cuuugauaaccaccugcaa

SEQ ID NO: 3654 - RNA, 19 nt, Artificial Sequence
  Description of Artificial Sequence: Synthetic oligonucleotide
auucuuuuuuggaucauuc

SEQ ID NO: 3655 - RNA, 19 nt, Artificial Sequence
  Description of Artificial Sequence: Synthetic oligonucleotide
cauccaucuaacaaauaca

SEQ ID NO: 3656 - RNA, 19 nt, Artificial Sequence
  Description of Artificial Sequence: Synthetic oligonucleotide
auaaugaggacaguucaug

SEQ ID NO: 3657 - RNA, 19 nt, Artificial Sequence
  Description of Artificial Sequence: Synthetic oligonucleotide
guuaaugaaaauccauguu

SEQ ID NO: 3658 - RNA, 19 nt, Artificial Sequence
  Description of Artificial Sequence: Synthetic oligonucleotide
uguuuaauagaaugccauc

SEQ ID NO: 3659 - RNA, 19 nt, Artificial Sequence
  Description of Artificial Sequence: Synthetic oligonucleotide
ccuuuaccuacuuuugcuc

SEQ ID NO: 3660 - RNA, 19 nt, Artificial Sequence
  Description of Artificial Sequence: Synthetic oligonucleotide
cuuuauggacguuuuucuu

SEQ ID NO: 3661 - RNA, 19 nt, Artificial Sequence
  Description of Artificial Sequence: Synthetic oligonucleotide
uuucaugcucuagugagcu

SEQ ID NO: 3662 - RNA, 19 nt, Artificial Sequence
  Description of Artificial Sequence: Synthetic oligonucleotide
uuucccuauaucaugagaa

SEQ ID NO: 3663 - RNA, 19 nt, Artificial Sequence
  Description of Artificial Sequence: Synthetic oligonucleotide
agugguuauauuugugcaa

SEQ ID NO: 3664 - RNA, 19 nt, Artificial Sequence
  Description of Artificial Sequence: Synthetic oligonucleotide
aauauacaaauauaggaaa

SEQ ID NO: 3665 - RNA, 19 nt, Artificial Sequence
  Description of Artificial Sequence: Synthetic oligonucleotide
aacaaagauucauaccugu

SEQ ID NO: 3666 - RNA, 19 nt, Artificial Sequence
  Description of Artificial Sequence: Synthetic oligonucleotide
uaggcaauagucuaacuug

SEQ ID NO: 3667 - RNA, 19 nt, Artificial Sequence
  Description of Artificial Sequence: Synthetic oligonucleotide
guccaaaccacuuugccuu

SEQ ID NO: 3668 - RNA, 19 nt, Artificial Sequence
  Description of Artificial Sequence: Synthetic oligonucleotide
uuacugcuauuuuuauccc

SEQ ID NO: 3669 - RNA, 19 nt, Artificial Sequence
  Description of Artificial Sequence: Synthetic oligonucleotide
ccaaugcguagauauuucc

SEQ ID NO: 3670 - RNA, 19 nt, Artificial Sequence
  Description of Artificial Sequence: Synthetic oligonucleotide
ccccaggccuauagccuuu

SEQ ID NO: 3671 - RNA, 19 nt, Artificial Sequence
  Description of Artificial Sequence: Synthetic oligonucleotide
ugugaaggaaagcaaauca

SEQ ID NO: 3672 - RNA, 19 nt, Artificial Sequence
  Description of Artificial Sequence: Synthetic oligonucleotide
auaccuccuguauauugac

SEQ ID NO: 3673 - RNA, 19 nt, Artificial Sequence
  Description of Artificial Sequence: Synthetic oligonucleotide
cacgaaucugguuuucaaa

SEQ ID NO: 3674 - RNA, 19 nt, Artificial Sequence
  Description of Artificial Sequence: Synthetic oligonucleotide
augucauuuccagauuuuu

SEQ ID NO: 3675 - RNA, 19 nt, Artificial Sequence
  Description of Artificial Sequence: Synthetic oligonucleotide
uuaguuaauuggggguugu

SEQ ID NO: 3676 - RNA, 19 nt, Artificial Sequence
  Description of Artificial Sequence: Synthetic oligonucleotide
uccuuuucccuuaauguga

SEQ ID NO: 3677 - RNA, 19 nt, Artificial Sequence
  Description of Artificial Sequence: Synthetic oligonucleotide
agagucauuuuccuguaua

SEQ ID NO: 3678 - RNA, 19 nt, Artificial Sequence
  Description of Artificial Sequence: Synthetic oligonucleotide
auuucuggaucucucaggg

SEQ ID NO: 3679 - RNA, 19 nt, Artificial Sequence
  Description of Artificial Sequence: Synthetic oligonucleotide
ggcugggaggggggaguga

SEQ ID NO: 3680 - RNA, 19 nt, Artificial Sequence
  Description of Artificial Sequence: Synthetic oligonucleotide
aggggacuacaaccauagc

SEQ ID NO: 3681 - RNA, 19 nt, Artificial Sequence
  Description of Artificial Sequence: Synthetic oligonucleotide
cacuccaagaacccuuuug

SEQ ID NO: 3682 - RNA, 19 nt, Artificial Sequence
  Description of Artificial Sequence: Synthetic oligonucleotide
gggauuacuccaguaauca

SEQ ID NO: 3683 - RNA, 19 nt, Artificial Sequence
  Description of Artificial Sequence: Synthetic oligonucleotide
aacuacgaaaguuauuuuc

SEQ ID NO: 3684 - RNA, 19 nt, Artificial Sequence
  Description of Artificial Sequence: Synthetic oligonucleotide
cuaaauguagauauguaag

SEQ ID NO: 3685 - RNA, 19 nt, Artificial Sequence
  Description of Artificial Sequence: Synthetic oligonucleotide
gguguucuuuuaaaguaag

SEQ ID NO: 3686 - RNA, 19 nt, Artificial Sequence
  Description of Artificial Sequence: Synthetic oligonucleotide
gguacuuugaaauauguag

SEQ ID NO: 3687 - RNA, 19 nt, Artificial Sequence
  Description of Artificial Sequence: Synthetic oligonucleotide
gcauaaacugguacugcug

SEQ ID NO: 3688 - RNA, 19 nt, Artificial Sequence
  Description of Artificial Sequence: Synthetic oligonucleotide
guuaaaugggucgauuauu

SEQ ID NO: 3689 - RNA, 19 nt, Artificial Sequence
  Description of Artificial Sequence: Synthetic oligonucleotide
uaaacggagcagcugugug

SEQ ID NO: 3690 - RNA, 19 nt, Artificial Sequence
  Description of Artificial Sequence: Synthetic oligonucleotide
gagggcagcuaacuuugaa

SEQ ID NO: 3691 - RNA, 19 nt, Artificial Sequence
  Description of Artificial Sequence: Synthetic oligonucleotide
augccugucucccuggcug

SEQ ID NO: 3692 - RNA, 19 nt, Artificial Sequence
  Description of Artificial Sequence: Synthetic oligonucleotide
ggugugucuccuucucaug

SEQ ID NO: 3693 - RNA, 19 nt, Artificial Sequence
  Description of Artificial Sequence: Synthetic oligonucleotide
guugagagcaccagggauu

SEQ ID NO: 3694 - RNA, 19 nt, Artificial Sequence
  Description of Artificial Sequence: Synthetic oligonucleotide
ugcguggcugcaugcugaa

SEQ ID NO: 3695 - RNA, 19 nt, Artificial Sequence
  Description of Artificial Sequence: Synthetic oligonucleotide
aaccgcauuuucccauggu

SEQ ID NO: 3696 - RNA, 19 nt, Artificial Sequence
  Description of Artificial Sequence: Synthetic oligonucleotide
uguaugacuaguucaucuc

SEQ ID NO: 3697 - RNA, 19 nt, Artificial Sequence
  Description of Artificial Sequence: Synthetic oligonucleotide
cuuucuugagcaccauuac

SEQ ID NO: 3698 - RNA, 19 nt, Artificial Sequence
  Description of Artificial Sequence: Synthetic oligonucleotide
caagaagaucaaaugaaaa

SEQ ID NO: 3699 - RNA, 19 nt, Artificial Sequence
  Description of Artificial Sequence: Synthetic oligonucleotide
augagaucaauguggaaga

SEQ ID NO: 3700 - RNA, 19 nt, Artificial Sequence
  Description of Artificial Sequence: Synthetic oligonucleotide
acaauucauagcacaaaaa

SEQ ID NO: 3701 - RNA, 19 nt, Artificial Sequence
  Description of Artificial Sequence: Synthetic oligonucleotide
aaagucaucuuaaaucuac

SEQ ID NO: 3702 - RNA, 19 nt, Artificial Sequence
  Description of Artificial Sequence: Synthetic oligonucleotide
cucucaaacauucaucuua

SEQ ID NO: 3703 - RNA, 19 nt, Artificial Sequence
  Description of Artificial Sequence: Synthetic oligonucleotide
auacaugcaucaaaguaau

SEQ ID NO: 3704 - RNA, 19 nt, Artificial Sequence
  Description of Artificial Sequence: Synthetic oligonucleotide
uuuacugacaucaguuugg

SEQ ID NO: 3705 - RNA, 19 nt, Artificial Sequence
  Description of Artificial Sequence: Synthetic oligonucleotide
ggugagagagggagucacu

SEQ ID NO: 3706 - RNA, 19 nt, Artificial Sequence
  Description of Artificial Sequence: Synthetic oligonucleotide
uuuacugaaaaggcagagg

SEQ ID NO: 3707 - RNA, 19 nt, Artificial Sequence
  Description of Artificial Sequence: Synthetic oligonucleotide
gcuuaagguguauacauuu

SEQ ID NO: 3708 - RNA, 19 nt, Artificial Sequence
  Description of Artificial Sequence: Synthetic oligonucleotide
uguacucacuuccuuauuu

SEQ ID NO: 3709 - RNA, 19 nt, Artificial Sequence
  Description of Artificial Sequence: Synthetic oligonucleotide
uucuuaacuuguaagcaga

SEQ ID NO: 3710 - RNA, 19 nt, Artificial Sequence
  Description of Artificial Sequence: Synthetic oligonucleotide
aaaacaagcccucucucuu

SEQ ID NO: 3711 - RNA, 19 nt, Artificial Sequence
  Description of Artificial Sequence: Synthetic oligonucleotide
ugugaaguaucuucaaagg

SEQ ID NO: 3712 - RNA, 19 nt, Artificial Sequence
  Description of Artificial Sequence: Synthetic oligonucleotide
gauuggggugcaaaaauac

SEQ ID NO: 3713 - RNA, 19 nt, Artificial Sequence
  Description of Artificial Sequence: Synthetic oligonucleotide
ccuugcugguaagccauca

SEQ ID NO: 3714 - RNA, 19 nt, Artificial Sequence
  Description of Artificial Sequence: Synthetic oligonucleotide
aauguuuuauuuaaauccc

SEQ ID NO: 3715 - RNA, 19 nt, Artificial Sequence
  Description of Artificial Sequence: Synthetic oligonucleotide
cugcauucaaaguuagcug

SEQ ID NO: 3716 - RNA, 19 nt, Artificial Sequence
  Description of Artificial Sequence: Synthetic oligonucleotide
gccuuuuugaaauaaacaa

SEQ ID NO: 3717 - RNA, 19 nt, Artificial Sequence
  Description of Artificial Sequence: Synthetic oligonucleotide
aacaaaaaauacuacugua

SEQ ID NO: 3718 - RNA, 19 nt, Artificial Sequence
  Description of Artificial Sequence: Synthetic oligonucleotide
auguuugaaaaugugaaua

SEQ ID NO: 3719 - RNA, 19 nt, Artificial Sequence
  Description of Artificial Sequence: Synthetic oligonucleotide
aguauuuuuauagcuuguu

SEQ ID NO: 3720 - RNA, 19 nt, Artificial Sequence
  Description of Artificial Sequence: Synthetic oligonucleotide
uaaagacauggcuaguugc

SEQ ID NO: 3721 - RNA, 19 nt, Artificial Sequence
  Description of Artificial Sequence: Synthetic oligonucleotide
cauuuguaaauaaguauaa

SEQ ID NO: 3722 - RNA, 19 nt, Artificial Sequence
  Description of Artificial Sequence: Synthetic oligonucleotide
auguugcuuugauuuucuu

SEQ ID NO: 3723 - RNA, 19 nt, Artificial Sequence
  Description of Artificial Sequence: Synthetic oligonucleotide
uuuguggacaucuuuauuu

SEQ ID NO: 3724 - RNA, 19 nt, Artificial Sequence
  Description of Artificial Sequence: Synthetic oligonucleotide
uggaacauaauugucuuua

SEQ ID NO: 3725 - RNA, 19 nt, Artificial Sequence
  Description of Artificial Sequence: Synthetic oligonucleotide
aggguugauuuguauauaa

SEQ ID NO: 3726 - RNA, 19 nt, Artificial Sequence
  Description of Artificial Sequence: Synthetic oligonucleotide
aguaauuggccugugauug

SEQ ID NO: 3727 - RNA, 19 nt, Artificial Sequence
  Description of Artificial Sequence: Synthetic oligonucleotide
guuucuuuuuugguuggaa

SEQ ID NO: 3728 - RNA, 19 nt, Artificial Sequence
  Description of Artificial Sequence: Synthetic oligonucleotide
aguuaucauuuugacauua

SEQ ID NO: 3729 - RNA, 19 nt, Artificial Sequence
  Description of Artificial Sequence: Synthetic oligonucleotide
acuugugauucuguguuca

SEQ ID NO: 3730 - RNA, 19 nt, Artificial Sequence
  Description of Artificial Sequence: Synthetic oligonucleotide
agcacuauugugauguguu

SEQ ID NO: 3731 - RNA, 19 nt, Artificial Sequence
  Description of Artificial Sequence: Synthetic oligonucleotide
ucaaccucugcacucgcuu

SEQ ID NO: 3732 - RNA, 19 nt, Artificial Sequence
  Description of Artificial Sequence: Synthetic oligonucleotide
uacacaauaggauaugcca

SEQ ID NO: 3733 - RNA, 19 nt, Artificial Sequence
  Description of Artificial Sequence: Synthetic oligonucleotide
aauugugugugguguaaug

SEQ ID NO: 3734 - RNA, 19 nt, Artificial Sequence
  Description of Artificial Sequence: Synthetic oligonucleotide
guuauuuugauuuuuuucc

SEQ ID NO: 3735 - RNA, 19 nt, Artificial Sequence
  Description of Artificial Sequence: Synthetic oligonucleotide
cauguuauugaugaaggau

SEQ ID NO: 3736 - RNA, 19 nt, Artificial Sequence
  Description of Artificial Sequence: Synthetic oligonucleotide
ucaugcaccuaacacauac

SEQ ID NO: 3737 - RNA, 19 nt, Artificial Sequence
  Description of Artificial Sequence: Synthetic oligonucleotide
cuaacuuuuuuaauguuag

SEQ ID NO: 3738 - RNA, 19 nt, Artificial Sequence
  Description of Artificial Sequence: Synthetic oligonucleotide
ggcauauuuuuaguauacu

SEQ ID NO: 3739 - RNA, 19 nt, Artificial Sequence
  Description of Artificial Sequence: Synthetic oligonucleotide
uuucucuuauucuuucuuc

SEQ ID NO: 3740 - RNA, 19 nt, Artificial Sequence
  Description of Artificial Sequence: Synthetic oligonucleotide
cuccuccaaccuuuuaccc

SEQ ID NO: 3741 - RNA, 19 nt, Artificial Sequence
  Description of Artificial Sequence: Synthetic oligonucleotide
cauccuccuuccuuucccu

SEQ ID NO: 3742 - RNA, 19 nt, Artificial Sequence
  Description of Artificial Sequence: Synthetic oligonucleotide
ucauuccuguuguuauuug

SEQ ID NO: 3743 - RNA, 19 nt, Artificial Sequence
  Description of Artificial Sequence: Synthetic oligonucleotide
gagaaugagggagaaacag

SEQ ID NO: 3744 - RNA, 19 nt, Artificial Sequence
  Description of Artificial Sequence: Synthetic oligonucleotide
guauuuuacauuuauguaa

SEQ ID NO: 3745 - RNA, 19 nt, Artificial Sequence
  Description of Artificial Sequence: Synthetic oligonucleotide
auuaggcuuuuccguuagu

SEQ ID NO: 3746 - RNA, 19 nt, Artificial Sequence
  Description of Artificial Sequence: Synthetic oligonucleotide
uucucaaggauccucuuuu

SEQ ID NO: 3747 - RNA, 19 nt, Artificial Sequence
  Description of Artificial Sequence: Synthetic oligonucleotide
uggcucuugggaaagaauu

SEQ ID NO: 3748 - RNA, 19 nt, Artificial Sequence
  Description of Artificial Sequence: Synthetic oligonucleotide
uguaccuguacaaggcaau

SEQ ID NO: 3749 - RNA, 19 nt, Artificial Sequence
  Description of Artificial Sequence: Synthetic oligonucleotide
uuauagaaugcgaacugcu

SEQ ID NO: 3750 - RNA, 19 nt, Artificial Sequence
  Description of Artificial Sequence: Synthetic oligonucleotide
uuugccucauuccauacug

SEQ ID NO: 3751 - RNA, 19 nt, Artificial Sequence
  Description of Artificial Sequence: Synthetic oligonucleotide
gaucaucccagcugaacaa

SEQ ID NO: 3752 - RNA, 19 nt, Artificial Sequence
  Description of Artificial Sequence: Synthetic oligonucleotide
auuugaaaacuguucugcc

SEQ ID NO: 3753 - RNA, 19 nt, Artificial Sequence
  Description of Artificial Sequence: Synthetic oligonucleotide
cuuuuuguuacaugaaucu

SEQ ID NO: 3754 - RNA, 19 nt, Artificial Sequence
  Description of Artificial Sequence: Synthetic oligonucleotide
ugucagaaauauauuuuua

SEQ ID NO: 3755 - RNA, 19 nt, Artificial Sequence
  Description of Artificial Sequence: Synthetic oligonucleotide
aauuuaauauaaaugaaau

SEQ ID NO: 3756 - RNA, 19 nt, Artificial Sequence
  Description of Artificial Sequence: Synthetic oligonucleotide
uucaauaaaauaugaaaca

SEQ ID NO: 3757 - RNA, 25 nt, Artificial Sequence
  Description of Artificial Sequence: Synthetic oligonucleotide
cacgcgcgcccggcugggggaucuc

SEQ ID NO: 3758 - RNA, 25 nt, Artificial Sequence
  Description of Artificial Sequence: Synthetic oligonucleotide
ccuccgcgugcccgaaagggggaua

SEQ ID NO: 3759 - RNA, 25 nt, Artificial Sequence
  Description of Artificial Sequence: Synthetic oligonucleotide
augccauuuggacauguaauuguca

SEQ ID NO: 3760 - RNA, 25 nt, Artificial Sequence
  Description of Artificial Sequence: Synthetic oligonucleotide
agcacgggaucugagacuuccaaaa

SEQ ID NO: 3761 - RNA, 25 nt, Artificial Sequence
  Description of Artificial Sequence: Synthetic oligonucleotide
aaaugaagccggcgacaggacuuug

SEQ ID NO: 3762 - RNA, 25 nt, Artificial Sequence
  Description of Artificial Sequence: Synthetic oligonucleotide
gggucugggugagccuucucguggc

SEQ ID NO: 3763 - RNA, 25 nt, Artificial Sequence
  Description of Artificial Sequence: Synthetic oligonucleotide
cggcggggaccguccagcccagcga

SEQ ID NO: 3764 - RNA, 25 nt, Artificial Sequence
  Description of Artificial Sequence: Synthetic oligonucleotide
auucucagucagugugugcaggaac

SEQ ID NO: 3765 - RNA, 25 nt, Artificial Sequence
  Description of Artificial Sequence: Synthetic oligonucleotide
cggagaauaaacugagcucucucuc

SEQ ID NO: 3766 - RNA, 25 nt, Artificial Sequence
  Description of Artificial Sequence: Synthetic oligonucleotide
cugaccuggaacagcaguaccgagc

SEQ ID NO: 3767 - RNA, 25 nt, Artificial Sequence
  Description of Artificial Sequence: Synthetic oligonucleotide
ccuugcgcaaguacuaugaaaacug

SEQ ID NO: 3768 - RNA, 25 nt, Artificial Sequence
  Description of Artificial Sequence: Synthetic oligonucleotide
gugagguugucaugggcaaccugga

SEQ ID NO: 3769 - RNA, 25 nt, Artificial Sequence
  Description of Artificial Sequence: Synthetic oligonucleotide
agauaaccagcauugagcacaaccg

SEQ ID NO: 3770 - RNA, 25 nt, Artificial Sequence
  Description of Artificial Sequence: Synthetic oligonucleotide
gggaccucuccuuccugcggucugu

SEQ ID NO: 3771 - RNA, 25 nt, Artificial Sequence
  Description of Artificial Sequence: Synthetic oligonucleotide
uucgagaagucacaggcuacguguu

SEQ ID NO: 3772 - RNA, 25 nt, Artificial Sequence
  Description of Artificial Sequence: Synthetic oligonucleotide
uaguggcucuuaaucaguuucguua

SEQ ID NO: 3773 - RNA, 25 nt, Artificial Sequence
  Description of Artificial Sequence: Synthetic oligonucleotide
accugccucuggagaauuuacgcau

SEQ ID NO: 3774 - RNA, 25 nt, Artificial Sequence
  Description of Artificial Sequence: Synthetic oligonucleotide
uuauucgugggacaaaacuuuauga

SEQ ID NO: 3775 - RNA, 25 nt, Artificial Sequence
  Description of Artificial Sequence: Synthetic oligonucleotide
aggaucgauaugccuuggcaauauu

SEQ ID NO: 3776 - RNA, 25 nt, Artificial Sequence
  Description of Artificial Sequence: Synthetic oligonucleotide
uuuuaaacuacagaaaagauggaaa

SEQ ID NO: 3777 - RNA, 25 nt, Artificial Sequence
  Description of Artificial Sequence: Synthetic oligonucleotide
acuuuggacuucaagaacuuggauu

SEQ ID NO: 3778 - RNA, 25 nt, Artificial Sequence
  Description of Artificial Sequence: Synthetic oligonucleotide
uaaagaacuugacagaaauccuaaa

SEQ ID NO: 3779 - RNA, 25 nt, Artificial Sequence
  Description of Artificial Sequence: Synthetic oligonucleotide
augguggagucuauguagaccagaa

SEQ ID NO: 3780 - RNA, 25 nt, Artificial Sequence
  Description of Artificial Sequence: Synthetic oligonucleotide
acaaauuccuuuguuaugcagacac

SEQ ID NO: 3781 - RNA, 25 nt, Artificial Sequence
  Description of Artificial Sequence: Synthetic oligonucleotide
ccauucauuggcaagauauuguucg

SEQ ID NO: 3782 - RNA, 25 nt, Artificial Sequence
  Description of Artificial Sequence: Synthetic oligonucleotide
ggaacccauggccuuccaacuugac

SEQ ID NO: 3783 - RNA, 25 nt, Artificial Sequence
  Description of Artificial Sequence: Synthetic oligonucleotide
cucuugugucaacaaaugguaguuc

SEQ ID NO: 3784 - RNA, 25 nt, Artificial Sequence
  Description of Artificial Sequence: Synthetic oligonucleotide
caggauguggacguugccauaaguc

SEQ ID NO: 3785 - RNA, 25 nt, Artificial Sequence
  Description of Artificial Sequence: Synthetic oligonucleotide
ccuguacuggccguugcuggggacc

SEQ ID NO: 3786 - RNA, 25 nt, Artificial Sequence
  Description of Artificial Sequence: Synthetic oligonucleotide
ccacagaaaaucauugccagacuuu

SEQ ID NO: 3787 - RNA, 25 nt, Artificial Sequence
  Description of Artificial Sequence: Synthetic oligonucleotide
ugacaaggacggugugugcagaaca

SEQ ID NO: 3788 - RNA, 25 nt, Artificial Sequence
  Description of Artificial Sequence: Synthetic oligonucleotide
aaugugacggcagaugcuacggacc

SEQ ID NO: 3789 - RNA, 25 nt, Artificial Sequence
  Description of Artificial Sequence: Synthetic oligonucleotide
cuuacgucagugacugcugccaucg

SEQ ID NO: 3790 - RNA, 25 nt, Artificial Sequence
  Description of Artificial Sequence: Synthetic oligonucleotide
gagaaugugcuggaggcugcucagg

SEQ ID NO: 3791 - RNA, 25 nt, Artificial Sequence
  Description of Artificial Sequence: Synthetic oligonucleotide
gaccuaaggacacagacugcuuugc

SEQ ID NO: 3792 - RNA, 25 nt, Artificial Sequence
  Description of Artificial Sequence: Synthetic oligonucleotide
ccugcaugaauuucaaugacagugg

SEQ ID NO: 3793 - RNA, 25 nt, Artificial Sequence
  Description of Artificial Sequence: Synthetic oligonucleotide
gagcauguguuacucagugucccca

SEQ ID NO: 3794 - RNA, 25 nt, Artificial Sequence
  Description of Artificial Sequence: Synthetic oligonucleotide
aaaccuuugucuacaauccaaccac

SEQ ID NO: 3795 - RNA, 25 nt, Artificial Sequence
  Description of Artificial Sequence: Synthetic oligonucleotide
ccuuucaacuggagcacaauuucaa

SEQ ID NO: 3796 - RNA, 25 nt, Artificial Sequence
  Description of Artificial Sequence: Synthetic oligonucleotide
augcaaaguacacauauggagcauu

SEQ ID NO: 3797 - RNA, 25 nt, Artificial Sequence
  Description of Artificial Sequence: Synthetic oligonucleotide
ucugugucaagaaauguccacauaa

SEQ ID NO: 3798 - RNA, 25 nt, Artificial Sequence
  Description of Artificial Sequence: Synthetic oligonucleotide
acuuugugguagauuccaguucuug

SEQ ID NO: 3799 - RNA, 25 nt, Artificial Sequence
  Description of Artificial Sequence: Synthetic oligonucleotide
gugugcgugccugcccuaguuccaa

SEQ ID NO: 3800 - RNA, 25 nt, Artificial Sequence
  Description of Artificial Sequence: Synthetic oligonucleotide
agauggaaguagaagaaaaugggau

SEQ ID NO: 3801 - RNA, 25 nt, Artificial Sequence
  Description of Artificial Sequence: Synthetic oligonucleotide
uuaaaauguguaaaccuugcacuga

SEQ ID NO: 3802 - RNA, 25 nt, Artificial Sequence
  Description of Artificial Sequence: Synthetic oligonucleotide
acauuugcccaaaagcuugugaugg

SEQ ID NO: 3803 - RNA, 25 nt, Artificial Sequence
  Description of Artificial Sequence: Synthetic oligonucleotide
gcauuggcacaggaucauugauguc

SEQ ID NO: 3804 - RNA, 25 nt, Artificial Sequence
  Description of Artificial Sequence: Synthetic oligonucleotide
cagcucagacuguggauuccaguaa

SEQ ID NO: 3805 - RNA, 25 nt, Artificial Sequence
  Description of Artificial Sequence: Synthetic oligonucleotide
acauugacaaauucauaaacuguac

SEQ ID NO: 3806 - RNA, 25 nt, Artificial Sequence
  Description of Artificial Sequence: Synthetic oligonucleotide
ccaagaucaaugggaauuugaucuu

SEQ ID NO: 3807 - RNA, 25 nt, Artificial Sequence
  Description of Artificial Sequence: Synthetic oligonucleotide
uucuagucacugguauucaugggga

SEQ ID NO: 3808 - RNA, 25 nt, Artificial Sequence
  Description of Artificial Sequence: Synthetic oligonucleotide
acccuuacaaugcaauugaagccau

SEQ ID NO: 3809 - RNA, 25 nt, Artificial Sequence
  Description of Artificial Sequence: Synthetic oligonucleotide
uagacccagagaaacugaacgucuu

SEQ ID NO: 3810 - RNA, 25 nt, Artificial Sequence
  Description of Artificial Sequence: Synthetic oligonucleotide
uucggacagucagagagauaacagg

SEQ ID NO: 3811 - RNA, 25 nt, Artificial Sequence
  Description of Artificial Sequence: Synthetic oligonucleotide
guuuccugaacauacagucauggcc

SEQ ID NO: 3812 - RNA, 25 nt, Artificial Sequence
  Description of Artificial Sequence: Synthetic oligonucleotide
caccaaacaugacugacuucagugu

SEQ ID NO: 3813 - RNA, 25 nt, Artificial Sequence
  Description of Artificial Sequence: Synthetic oligonucleotide
uuuuuucuaaccuggugaccauugg

SEQ ID NO: 3814 - RNA, 25 nt, Artificial Sequence
  Description of Artificial Sequence: Synthetic oligonucleotide
guggaagaguacucuauaguggccu

SEQ ID NO: 3815 - RNA, 25 nt, Artificial Sequence
  Description of Artificial Sequence: Synthetic oligonucleotide
uguccuugcuuauccucaagcaaca

SEQ ID NO: 3816 - RNA, 25 nt, Artificial Sequence
  Description of Artificial Sequence: Synthetic oligonucleotide
agggcaucaccucucuacaguucca

SEQ ID NO: 3817 - RNA, 25 nt, Artificial Sequence
  Description of Artificial Sequence: Synthetic oligonucleotide
agucccugaaggaaaucagcgcagg

SEQ ID NO: 3818 - RNA, 25 nt, Artificial Sequence
  Description of Artificial Sequence: Synthetic oligonucleotide
gaaacaucuauauuacugacaacag

SEQ ID NO: 3819 - RNA, 25 nt, Artificial Sequence
  Description of Artificial Sequence: Synthetic oligonucleotide
gcaaccuguguuauuaucauaccau

SEQ ID NO: 3820 - RNA, 25 nt, Artificial Sequence
  Description of Artificial Sequence: Synthetic oligonucleotide
uuaacuggacaacacucuucagcac

SEQ ID NO: 3821 - RNA, 25 nt, Artificial Sequence
  Description of Artificial Sequence: Synthetic oligonucleotide
caaucaaccagagaauaguaauccg

SEQ ID NO: 3822 - RNA, 25 nt, Artificial Sequence
  Description of Artificial Sequence: Synthetic oligonucleotide
gggacaacagaaaagcugaaaauug

SEQ ID NO: 3823 - RNA, 25 nt, Artificial Sequence
  Description of Artificial Sequence: Synthetic oligonucleotide
guacugcugaaggaauggugugcaa

SEQ ID NO: 3824 - RNA, 25 nt, Artificial Sequence
  Description of Artificial Sequence: Synthetic oligonucleotide
accaucuguguuccagugauggcug

SEQ ID NO: 3825 - RNA, 25 nt, Artificial Sequence
  Description of Artificial Sequence: Synthetic oligonucleotide
guuggggaccugggccagaccaaug

SEQ ID NO: 3826 - RNA, 25 nt, Artificial Sequence
  Description of Artificial Sequence: Synthetic oligonucleotide
gucugucgugucgccgcuucaguag

SEQ ID NO: 3827 - RNA, 25 nt, Artificial Sequence
  Description of Artificial Sequence: Synthetic oligonucleotide
gaggaaggaucugcauagagucuug

SEQ ID NO: 3828 - RNA, 25 nt, Artificial Sequence
  Description of Artificial Sequence: Synthetic oligonucleotide
guaaccucuaugauggugaauuucg

SEQ ID NO: 3829 - RNA, 25 nt, Artificial Sequence
  Description of Artificial Sequence: Synthetic oligonucleotide
gggaguuugagaauggcuccaucug

SEQ ID NO: 3830 - RNA, 25 nt, Artificial Sequence
  Description of Artificial Sequence: Synthetic oligonucleotide
guguggagugugacccccaguguga

SEQ ID NO: 3831 - RNA, 25 nt, Artificial Sequence
  Description of Artificial Sequence: Synthetic oligonucleotide
agaagauggaagauggccuccucac

SEQ ID NO: 3832 - RNA, 25 nt, Artificial Sequence
  Description of Artificial Sequence: Synthetic oligonucleotide
caugccauggaccggguccugacaa

SEQ ID NO: 3833 - RNA, 25 nt, Artificial Sequence
  Description of Artificial Sequence: Synthetic oligonucleotide
acuguacaaagugcucucauuuuaa

SEQ ID NO: 3834 - RNA, 25 nt, Artificial Sequence
  Description of Artificial Sequence: Synthetic oligonucleotide
aagauggcccaaacuguguggaaaa

SEQ ID NO: 3835 - RNA, 25 nt, Artificial Sequence
  Description of Artificial Sequence: Synthetic oligonucleotide
aauguccagauggcuuacagggggc

SEQ ID NO: 3836 - RNA, 25 nt, Artificial Sequence
  Description of Artificial Sequence: Synthetic oligonucleotide
caaacaguuucauuuucaaguaugc

SEQ ID NO: 3837 - RNA, 25 nt, Artificial Sequence
  Description of Artificial Sequence: Synthetic oligonucleotide
cugauccagaucgggagugccaccc

SEQ ID NO: 3838 - RNA, 25 nt, Artificial Sequence
  Description of Artificial Sequence: Synthetic oligonucleotide
caugccauccaaacugcacccaagg

SEQ ID NO: 3839 - RNA, 25 nt, Artificial Sequence
  Description of Artificial Sequence: Synthetic oligonucleotide
gguguaacggucccacuagucauga

SEQ ID NO: 3840 - RNA, 25 nt, Artificial Sequence
  Description of Artificial Sequence: Synthetic oligonucleotide
acugcauuuacuacccauggacggg

SEQ ID NO: 3841 - RNA, 25 nt, Artificial Sequence
  Description of Artificial Sequence: Synthetic oligonucleotide
gccauuccacuuuaccacaacaugc

SEQ ID NO: 3842 - RNA, 25 nt, Artificial Sequence
  Description of Artificial Sequence: Synthetic oligonucleotide
cuagaacuccccugauugcagcugg

SEQ ID NO: 3843 - RNA, 25 nt, Artificial Sequence
  Description of Artificial Sequence: Synthetic oligonucleotide
gaguaauuggugggcucuucauucu

SEQ ID NO: 3844 - RNA, 25 nt, Artificial Sequence
  Description of Artificial Sequence: Synthetic oligonucleotide
uggucauugugggucugacauuugc

SEQ ID NO: 3845 - RNA, 25 nt, Artificial Sequence
  Description of Artificial Sequence: Synthetic oligonucleotide
cuguuuauguuagaaggaagagcau

SEQ ID NO: 3846 - RNA, 25 nt, Artificial Sequence
  Description of Artificial Sequence: Synthetic oligonucleotide
ucaaaaagaaaagagccuugagaag

SEQ ID NO: 3847 - RNA, 25 nt, Artificial Sequence
  Description of Artificial Sequence: Synthetic oligonucleotide
gauucuuggaaacagaguuggugga

SEQ ID NO: 3848 - RNA, 25 nt, Artificial Sequence
  Description of Artificial Sequence: Synthetic oligonucleotide
aaccauuaacucccaguggcacagc

SEQ ID NO: 3849 - RNA, 25 nt, Artificial Sequence
  Description of Artificial Sequence: Synthetic oligonucleotide
cacccaaucaagcucaacuucguau

SEQ ID NO: 3850 - RNA, 25 nt, Artificial Sequence
  Description of Artificial Sequence: Synthetic oligonucleotide
uuuugaaagaaacugagcugaagag

SEQ ID NO: 3851 - RNA, 25 nt, Artificial Sequence
  Description of Artificial Sequence: Synthetic oligonucleotide
ggguaaaaguccuuggcucaggugc

SEQ ID NO: 3852 - RNA, 25 nt, Artificial Sequence
  Description of Artificial Sequence: Synthetic oligonucleotide
cuuuuggaacgguuuauaaagguau

SEQ ID NO: 3853 - RNA, 25 nt, Artificial Sequence
  Description of Artificial Sequence: Synthetic oligonucleotide
uuuggguaccugaaggagaaacugu

SEQ ID NO: 3854 - RNA, 25 nt, Artificial Sequence
  Description of Artificial Sequence: Synthetic oligonucleotide
ugaagauuccuguggcuauuaagau

SEQ ID NO: 3855 - RNA, 25 nt, Artificial Sequence
  Description of Artificial Sequence: Synthetic oligonucleotide
uucuuaaugagacaacuggucccaa

SEQ ID NO: 3856 - RNA, 25 nt, Artificial Sequence
  Description of Artificial Sequence: Synthetic oligonucleotide
aggcaaauguggaguucauggauga

SEQ ID NO: 3857 - RNA, 25 nt, Artificial Sequence
  Description of Artificial Sequence: Synthetic oligonucleotide
aagcucugaucauggcaaguaugga

SEQ ID NO: 3858 - RNA, 25 nt, Artificial Sequence
  Description of Artificial Sequence: Synthetic oligonucleotide
aucauccacaccuaguccgguugcu

SEQ ID NO: 3859 - RNA, 25 nt, Artificial Sequence
  Description of Artificial Sequence: Synthetic oligonucleotide
ugggugugugucugagcccaaccau

SEQ ID NO: 3860 - RNA, 25 nt, Artificial Sequence
  Description of Artificial Sequence: Synthetic oligonucleotide
uccagcugguuacucaacuuaugcc

SEQ ID NO: 3861 - RNA, 25 nt, Artificial Sequence
  Description of Artificial Sequence: Synthetic oligonucleotide
cccauggcugccuguuggaguaugu

SEQ ID NO: 3862 - RNA, 25 nt, Artificial Sequence
  Description of Artificial Sequence: Synthetic oligonucleotide
uccacgagcacaaggauaacauugg

SEQ ID NO: 3863 - RNA, 25 nt, Artificial Sequence
  Description of Artificial Sequence: Synthetic oligonucleotide
gaucacaacugcugcuuaacuggug

SEQ ID NO: 3864 - RNA, 25 nt, Artificial Sequence
  Description of Artificial Sequence: Synthetic oligonucleotide
guguccagauagcuaagggaaugau

SEQ ID NO: 3865 - RNA, 25 nt, Artificial Sequence
  Description of Artificial Sequence: Synthetic oligonucleotide
uguaccuggaagaaagacgacucgu

SEQ ID NO: 3866 - RNA, 25 nt, Artificial Sequence
  Description of Artificial Sequence: Synthetic oligonucleotide
uucaucgggauuuggcagcccguaa

SEQ ID NO: 3867 - RNA, 25 nt, Artificial Sequence
  Description of Artificial Sequence: Synthetic oligonucleotide
augucuuagugaaaucuccaaacca

SEQ ID NO: 3868 - RNA, 25 nt, Artificial Sequence
  Description of Artificial Sequence: Synthetic oligonucleotide
augugaaaaucacagauuuugggcu

SEQ ID NO: 3869 - RNA, 25 nt, Artificial Sequence
  Description of Artificial Sequence: Synthetic oligonucleotide
uagccagacucuuggaaggagauga

SEQ ID NO: 3870 - RNA, 25 nt, Artificial Sequence
  Description of Artificial Sequence: Synthetic oligonucleotide
aaaaagaguacaaugcugauggagg

SEQ ID NO: 3871 - RNA, 25 nt, Artificial Sequence
  Description of Artificial Sequence: Synthetic oligonucleotide
gaaagaugccaauuaaauggauggc

SEQ ID NO: 3872 - RNA, 25 nt, Artificial Sequence
  Description of Artificial Sequence: Synthetic oligonucleotide
cucuggaguguauacauuacaggaa

SEQ ID NO: 3873 - RNA, 25 nt, Artificial Sequence
  Description of Artificial Sequence: Synthetic oligonucleotide
aauucacccaucagagugacguuug

SEQ ID NO: 3874 - RNA, 25 nt, Artificial Sequence
  Description of Artificial Sequence: Synthetic oligonucleotide
ggagcuauggaguuacuauauggga

SEQ ID NO: 3875 - RNA, 25 nt, Artificial Sequence
  Description of Artificial Sequence: Synthetic oligonucleotide
aacugaugaccuuuggaggaaaacc

SEQ ID NO: 3876 - RNA, 25 nt, Artificial Sequence
  Description of Artificial Sequence: Synthetic oligonucleotide
ccuaugauggaauuccaacgcgaga

SEQ ID NO: 3877 - RNA, 25 nt, Artificial Sequence
  Description of Artificial Sequence: Synthetic oligonucleotide
aaaucccugauuuauuagagaaagg

SEQ ID NO: 3878 - RNA, 25 nt, Artificial Sequence
  Description of Artificial Sequence: Synthetic oligonucleotide
gagaacguuugccucagccucccau

SEQ ID NO: 3879 - RNA, 25 nt, Artificial Sequence
  Description of Artificial Sequence: Synthetic oligonucleotide
ucugcacuauugacguuuacauggu

SEQ ID NO: 3880 - RNA, 25 nt, Artificial Sequence
  Description of Artificial Sequence: Synthetic oligonucleotide
ucauggucaaauguuggaugauuga

SEQ ID NO: 3881 - RNA, 25 nt, Artificial Sequence
  Description of Artificial Sequence: Synthetic oligonucleotide
augcugacaguagaccuaaauuuaa

SEQ ID NO: 3882 - RNA, 25 nt, Artificial Sequence
  Description of Artificial Sequence: Synthetic oligonucleotide
aggaacuggcugcugaguuuucaag

SEQ ID NO: 3883 - RNA, 25 nt, Artificial Sequence
  Description of Artificial Sequence: Synthetic oligonucleotide
ggauggcucgagacccucaaagaua

SEQ ID NO: 3884 - RNA, 25 nt, Artificial Sequence
  Description of Artificial Sequence: Synthetic oligonucleotide
accuaguuauucagggugaugaucg

SEQ ID NO: 3885 - RNA, 25 nt, Artificial Sequence
  Description of Artificial Sequence: Synthetic oligonucleotide
guaugaagcuucccaguccaaauga

SEQ ID NO: 3886 - RNA, 25 nt, Artificial Sequence
  Description of Artificial Sequence: Synthetic oligonucleotide
acagcaaguucuuucagaaucucuu

SEQ ID NO: 3887 - RNA, 25 nt, Artificial Sequence
  Description of Artificial Sequence: Synthetic oligonucleotide
uggaugaagaggauuuggaagauau

SEQ ID NO: 3888 - RNA, 25 nt, Artificial Sequence
  Description of Artificial Sequence: Synthetic oligonucleotide
ugauggaugcugaggaguacuuggu

SEQ ID NO: 3889 - RNA, 25 nt, Artificial Sequence
  Description of Artificial Sequence: Synthetic oligonucleotide
ucccucaggcuuucaacaucccacc

SEQ ID NO: 3890 - RNA, 25 nt, Artificial Sequence
  Description of Artificial Sequence: Synthetic oligonucleotide
cucccaucuauacuuccagagcaag

SEQ ID NO: 3891 - RNA, 25 nt, Artificial Sequence
  Description of Artificial Sequence: Synthetic oligonucleotide
gaauugacucgaauaggagugaaau

SEQ ID NO: 3892 - RNA, 25 nt, Artificial Sequence
  Description of Artificial Sequence: Synthetic oligonucleotide
uuggacacagcccuccuccugccua

SEQ ID NO: 3893 - RNA, 25 nt, Artificial Sequence
  Description of Artificial Sequence: Synthetic oligonucleotide
acacccccaugucaggaaaccaguu

SEQ ID NO: 3894 - RNA, 25 nt, Artificial Sequence
  Description of Artificial Sequence: Synthetic oligonucleotide
uuguauaccgagauggagguuuugc

SEQ ID NO: 3895 - RNA, 25 nt, Artificial Sequence
  Description of Artificial Sequence: Synthetic oligonucleotide
cugcugaacaaggagugucugugcc

SEQ ID NO: 3896 - RNA, 25 nt, Artificial Sequence
  Description of Artificial Sequence: Synthetic oligonucleotide
ccuacagagccccaacuagcacaau

SEQ ID NO: 3897 - RNA, 25 nt, Artificial Sequence
  Description of Artificial Sequence: Synthetic oligonucleotide
uuccagaagcuccuguggcacaggg

SEQ ID NO: 3898 - RNA, 25 nt, Artificial Sequence
  Description of Artificial Sequence: Synthetic oligonucleotide
gugcuacugcugagauuuuugauga

SEQ ID NO: 3899 - RNA, 25 nt, Artificial Sequence
  Description of Artificial Sequence: Synthetic oligonucleotide
acuccugcuguaauggcacccuacg

SEQ ID NO: 3900 - RNA, 25 nt, Artificial Sequence
  Description of Artificial Sequence: Synthetic oligonucleotide
gcaagccaguggcaccccaugucca

SEQ ID NO: 3901 - RNA, 25 nt, Artificial Sequence
  Description of Artificial Sequence: Synthetic oligonucleotide
aagaggacaguagcacccagaggua

SEQ ID NO: 3902 - RNA, 25 nt, Artificial Sequence
  Description of Artificial Sequence: Synthetic oligonucleotide
acagugcugaccccaccguguuugc

SEQ ID NO: 3903 - RNA, 25 nt, Artificial Sequence
  Description of Artificial Sequence: Synthetic oligonucleotide
ccccagaacggagcccacgaggaga

SEQ ID NO: 3904 - RNA, 25 nt, Artificial Sequence
  Description of Artificial Sequence: Synthetic oligonucleotide
agcuggaugaggaagguuacaugac

SEQ ID NO: 3905 - RNA, 25 nt, Artificial Sequence
  Description of Artificial Sequence: Synthetic oligonucleotide
cuccuaugcgagacaaacccaaaca

SEQ ID NO: 3906 - RNA, 25 nt, Artificial Sequence
  Description of Artificial Sequence: Synthetic oligonucleotide
aagaauaccugaauccaguggagga

SEQ ID NO: 3907 - RNA, 25 nt, Artificial Sequence
  Description of Artificial Sequence: Synthetic oligonucleotide
agaacccuuuuguuucucggagaaa

SEQ ID NO: 3908 - RNA, 25 nt, Artificial Sequence
  Description of Artificial Sequence: Synthetic oligonucleotide
aaaauggagaccuucaagcauugga

SEQ ID NO: 3909 - RNA, 25 nt, Artificial Sequence
  Description of Artificial Sequence: Synthetic oligonucleotide
auaaucccgaauaucacaaugcauc

SEQ ID NO: 3910 - RNA, 25 nt, Artificial Sequence
  Description of Artificial Sequence: Synthetic oligonucleotide
ccaaugguccacccaaggccgagga

SEQ ID NO: 3911 - RNA, 25 nt, Artificial Sequence
  Description of Artificial Sequence: Synthetic oligonucleotide
augaguaugugaaugagccacugua

SEQ ID NO: 3912 - RNA, 25 nt, Artificial Sequence
  Description of Artificial Sequence: Synthetic oligonucleotide
accucaacaccuuugccaacaccuu

SEQ ID NO: 3913 - RNA, 25 nt, Artificial Sequence
  Description of Artificial Sequence: Synthetic oligonucleotide
ugggaaaagcugaguaccugaagaa

SEQ ID NO: 3914 - RNA, 25 nt, Artificial Sequence
  Description of Artificial Sequence: Synthetic oligonucleotide
acaacauacugucaaugccagagaa

SEQ ID NO: 3915 - RNA, 25 nt, Artificial Sequence
  Description of Artificial Sequence: Synthetic oligonucleotide
aggccaagaaagcguuugacaaccc

SEQ ID NO: 3916 - RNA, 25 nt, Artificial Sequence
  Description of Artificial Sequence: Synthetic oligonucleotide
cugacuacuggaaccacagccugcc

SEQ ID NO: 3917 - RNA, 25 nt, Artificial Sequence
  Description of Artificial Sequence: Synthetic oligonucleotide
caccucggagcacccuucagcaccc

SEQ ID NO: 3918 - RNA, 25 nt, Artificial Sequence
  Description of Artificial Sequence: Synthetic oligonucleotide
cagacuaccugcaggaguacagcac

SEQ ID NO: 3919 - RNA, 25 nt, Artificial Sequence
  Description of Artificial Sequence: Synthetic oligonucleotide
caaaauauuuuuauaaacagaaugg

SEQ ID NO: 3920 - RNA, 25 nt, Artificial Sequence
  Description of Artificial Sequence: Synthetic oligonucleotide
ggcggauccggccuauuguggcaga

SEQ ID NO: 3921 - RNA, 25 nt, Artificial Sequence
  Description of Artificial Sequence: Synthetic oligonucleotide
agaauccugaauaccucucugaguu

SEQ ID NO: 3922 - RNA, 25 nt, Artificial Sequence
  Description of Artificial Sequence: Synthetic oligonucleotide
ucucccugaagccaggcacugugcu

SEQ ID NO: 3923 - RNA, 25 nt, Artificial Sequence
  Description of Artificial Sequence: Synthetic oligonucleotide
ugccgccuccaccuuacagacaccg

SEQ ID NO: 3924 - RNA, 25 nt, Artificial Sequence
  Description of Artificial Sequence: Synthetic oligonucleotide
ggaauacugugguguaagcucaguu

SEQ ID NO: 3925 - RNA, 25 nt, Artificial Sequence
  Description of Artificial Sequence: Synthetic oligonucleotide
ugugguuuuuuagguggagagacac

SEQ ID NO: 3926 - RNA, 25 nt, Artificial Sequence
  Description of Artificial Sequence: Synthetic oligonucleotide
caccugcuccaauuuccccaccccc

SEQ ID NO: 3927 - RNA, 25 nt, Artificial Sequence
  Description of Artificial Sequence: Synthetic oligonucleotide
ccucucuuucucugguggucuuccu

SEQ ID NO: 3928 - RNA, 25 nt, Artificial Sequence
  Description of Artificial Sequence: Synthetic oligonucleotide
uucuaccccaaggccaguaguuuug

SEQ ID NO: 3929 - RNA, 25 nt, Artificial Sequence
  Description of Artificial Sequence: Synthetic oligonucleotide
gacacuucccaguggaagauacaga

SEQ ID NO: 3930 - RNA, 25 nt, Artificial Sequence
  Description of Artificial Sequence: Synthetic oligonucleotide
agaugcaaugauaguuaugugcuua

SEQ ID NO: 3931 - RNA, 25 nt, Artificial Sequence
  Description of Artificial Sequence: Synthetic oligonucleotide
accuaacuugaacauuagagggaaa

SEQ ID NO: 3932 - RNA, 25 nt, Artificial Sequence
  Description of Artificial Sequence: Synthetic oligonucleotide
agacugaaagagaaagauaggagga

SEQ ID NO: 3933 - RNA, 25 nt, Artificial Sequence
  Description of Artificial Sequence: Synthetic oligonucleotide
aaccacaauguuucuucauuucucu

SEQ ID NO: 3934 - RNA, 25 nt, Artificial Sequence
  Description of Artificial Sequence: Synthetic oligonucleotide
ugcauggguuggucaggagaaugaa

SEQ ID NO: 3935 - RNA, 25 nt, Artificial Sequence
  Description of Artificial Sequence: Synthetic oligonucleotide
aacagcuagagaaggaccagaaaau

SEQ ID NO: 3936 - RNA, 25 nt, Artificial Sequence
  Description of Artificial Sequence: Synthetic oligonucleotide
uguaaggcaaugcugccuacuauca

SEQ ID NO: 3937 - RNA, 25 nt, Artificial Sequence
  Description of Artificial Sequence: Synthetic oligonucleotide
aaacuagcugucacuuuuuuucuuu

SEQ ID NO: 3938 - RNA, 25 nt, Artificial Sequence
  Description of Artificial Sequence: Synthetic oligonucleotide
uuucuuuuucuuucuuuguuucuuu

SEQ ID NO: 3939 - RNA, 25 nt, Artificial Sequence
  Description of Artificial Sequence: Synthetic oligonucleotide
uuuuuaaagcagaugguugaaacac

SEQ ID NO: 3940 - RNA, 25 nt, Artificial Sequence
  Description of Artificial Sequence: Synthetic oligonucleotide
cccaugcuaucuguuccuaucugca

SEQ ID NO: 3941 - RNA, 25 nt, Artificial Sequence
  Description of Artificial Sequence: Synthetic oligonucleotide
aggaacugaugugugcauauuuagc

SEQ ID NO: 3942 - RNA, 25 nt, Artificial Sequence
  Description of Artificial Sequence: Synthetic oligonucleotide
caucccuggaaaucauaauaaaguu

SEQ ID NO: 3943 - RNA, 25 nt, Artificial Sequence
  Description of Artificial Sequence: Synthetic oligonucleotide
uuccauuagaacaaaagaauaacau

SEQ ID NO: 3944 - RNA, 25 nt, Artificial Sequence
  Description of Artificial Sequence: Synthetic oligonucleotide
uuuucuauaacauaugauggugucu

SEQ ID NO: 3945 - RNA, 25 nt, Artificial Sequence
  Description of Artificial Sequence: Synthetic oligonucleotide
ugaaauugagaauccaguuucuuuc

SEQ ID NO: 3946 - RNA, 25 nt, Artificial Sequence
  Description of Artificial Sequence: Synthetic oligonucleotide
ccccagcaguuucuguccuagcaag

SEQ ID NO: 3947 - RNA, 25 nt, Artificial Sequence
  Description of Artificial Sequence: Synthetic oligonucleotide
guaagaauggccaacucaacuuuca

SEQ ID NO: 3948 - RNA, 25 nt, Artificial Sequence
  Description of Artificial Sequence: Synthetic oligonucleotide
auaauuuaaaaaucuccauuaaagu

SEQ ID NO: 3949 - RNA, 25 nt, Artificial Sequence
  Description of Artificial Sequence: Synthetic oligonucleotide
uuauaacuaguaauuauguuuucaa

SEQ ID NO: 3950 - RNA, 25 nt, Artificial Sequence
  Description of Artificial Sequence: Synthetic oligonucleotide
acacuuuuugguuuuuuucauuuug

SEQ ID NO: 3951 - RNA, 25 nt, Artificial Sequence
  Description of Artificial Sequence: Synthetic oligonucleotide
guuuugcucugaccgauuccuuuau

SEQ ID NO: 3952 - RNA, 25 nt, Artificial Sequence
  Description of Artificial Sequence: Synthetic oligonucleotide
uauuugcuccccuauuuuuggcuuu

SEQ ID NO: 3953 - RNA, 25 nt, Artificial Sequence
  Description of Artificial Sequence: Synthetic oligonucleotide
uaauuucuaauugcaaagauguuua

SEQ ID NO: 3954 - RNA, 25 nt, Artificial Sequence
  Description of Artificial Sequence: Synthetic oligonucleotide
acaucaaagcuucuucacagaauuu

SEQ ID NO: 3955 - RNA, 25 nt, Artificial Sequence
  Description of Artificial Sequence: Synthetic oligonucleotide
uaagcaagaaauauuuuaauauagu

SEQ ID NO: 3956 - RNA, 25 nt, Artificial Sequence
  Description of Artificial Sequence: Synthetic oligonucleotide
ugaaauggccacuacuuuaaguaua

SEQ ID NO: 3957 - RNA, 25 nt, Artificial Sequence
  Description of Artificial Sequence: Synthetic oligonucleotide
acaaucuuuaaaauaagaaagggag

SEQ ID NO: 3958 - RNA, 25 nt, Artificial Sequence
  Description of Artificial Sequence: Synthetic oligonucleotide
ggcuaauauuuuucaugcuaucaaa

SEQ ID NO: 3959 - RNA, 25 nt, Artificial Sequence
  Description of Artificial Sequence: Synthetic oligonucleotide
auuaucuucacccucauccuuuaca

SEQ ID NO: 3960 - RNA, 25 nt, Artificial Sequence
  Description of Artificial Sequence: Synthetic oligonucleotide
auuuuucaacauuuuuuuuucucca

SEQ ID NO: 3961 - RNA, 25 nt, Artificial Sequence
  Description of Artificial Sequence: Synthetic oligonucleotide
auaaaugacacuacuugauaggccg

SEQ ID NO: 3962 - RNA, 25 nt, Artificial Sequence
  Description of Artificial Sequence: Synthetic oligonucleotide
guugguugucugaagaguagaaggg

SEQ ID NO: 3963 - RNA, 25 nt, Artificial Sequence
  Description of Artificial Sequence: Synthetic oligonucleotide
gaaacuaagagacaguucucugugg

SEQ ID NO: 3964 - RNA, 25 nt, Artificial Sequence
  Description of Artificial Sequence: Synthetic oligonucleotide
guucaggaaaacuacugauacuuuc

SEQ ID NO: 3965 - RNA, 25 nt, Artificial Sequence
  Description of Artificial Sequence: Synthetic oligonucleotide
cagggguggcccaaugagggaaucc

SEQ ID NO: 3966 - RNA, 25 nt, Artificial Sequence
  Description of Artificial Sequence: Synthetic oligonucleotide
cauugaacuggaagaaacacacugg

SEQ ID NO: 3967 - RNA, 25 nt, Artificial Sequence
  Description of Artificial Sequence: Synthetic oligonucleotide
gauuggguaugucuaccuggcagau

SEQ ID NO: 3968 - RNA, 25 nt, Artificial Sequence
  Description of Artificial Sequence: Synthetic oligonucleotide
uacucagaaauguaguuugcacuua

SEQ ID NO: 3969 - RNA, 25 nt, Artificial Sequence
  Description of Artificial Sequence: Synthetic oligonucleotide
aagcuguaauuuuauuuguucuuuu

SEQ ID NO: 3970 - RNA, 25 nt, Artificial Sequence
  Description of Artificial Sequence: Synthetic oligonucleotide
uucugaacuccauuuuggauuuuga

SEQ ID NO: 3971 - RNA, 25 nt, Artificial Sequence
  Description of Artificial Sequence: Synthetic oligonucleotide
aaucaagcaauauggaagcaaccag

SEQ ID NO: 3972 - RNA, 25 nt, Artificial Sequence
  Description of Artificial Sequence: Synthetic oligonucleotide
gcaaauuaacuaauuuaaguacauu

SEQ ID NO: 3973 - RNA, 25 nt, Artificial Sequence
  Description of Artificial Sequence: Synthetic oligonucleotide
uuuuaaaaaaagagcuaagauaaag

SEQ ID NO: 3974 - RNA, 25 nt, Artificial Sequence
  Description of Artificial Sequence: Synthetic oligonucleotide
gacuguggaaaugccaaaccaagca

SEQ ID NO: 3975 - RNA, 25 nt, Artificial Sequence
  Description of Artificial Sequence: Synthetic oligonucleotide
aaauuaggaaccuugcaacgguauc

SEQ ID NO: 3976 - RNA, 25 nt, Artificial Sequence
  Description of Artificial Sequence: Synthetic oligonucleotide
ccagggacuaugaugagaggccagc

SEQ ID NO: 3977 - RNA, 25 nt, Artificial Sequence
  Description of Artificial Sequence: Synthetic oligonucleotide
cacauuaucuucauaugucaccuuu

SEQ ID NO: 3978 - RNA, 25 nt, Artificial Sequence
  Description of Artificial Sequence: Synthetic oligonucleotide
ugcuacgcaaggaaauuuguucagu

SEQ ID NO: 3979 - RNA, 25 nt, Artificial Sequence
  Description of Artificial Sequence: Synthetic oligonucleotide
uucguauacuucguaagaaggaaug

SEQ ID NO: 3980 - RNA, 25 nt, Artificial Sequence
  Description of Artificial Sequence: Synthetic oligonucleotide
gcgaguaaggauuggcuugaauucc

SEQ ID NO: 3981 - RNA, 25 nt, Artificial Sequence
  Description of Artificial Sequence: Synthetic oligonucleotide
cauggaauuucuaguaugagacuau

SEQ ID NO: 3982 - RNA, 25 nt, Artificial Sequence
  Description of Artificial Sequence: Synthetic oligonucleotide
uuuauaugaaguagaagguaacucu

SEQ ID NO: 3983 - RNA, 25 nt, Artificial Sequence
  Description of Artificial Sequence: Synthetic oligonucleotide
uuugcacauaaauugguauaauaaa

SEQ ID NO: 3984 - RNA, 25 nt, Artificial Sequence
  Description of Artificial Sequence: Synthetic oligonucleotide
aaagaaaaacacaaacauucaaagc

SEQ ID NO: 3985 - RNA, 25 nt, Artificial Sequence
  Description of Artificial Sequence: Synthetic oligonucleotide
cuuagggauagguccuugggucaaa

SEQ ID NO: 3986 - RNA, 25 nt, Artificial Sequence
  Description of Artificial Sequence: Synthetic oligonucleotide
aaguuguaaauaaaugugaaacauc

SEQ ID NO: 3987 - RNA, 25 nt, Artificial Sequence
  Description of Artificial Sequence: Synthetic oligonucleotide
cuucucaugcaauuauuuuauuauc

SEQ ID NO: 3988 - RNA, 25 nt, Artificial Sequence
  Description of Artificial Sequence: Synthetic oligonucleotide
ccaacacacuaaucuuuugauacuu

SEQ ID NO: 3989 - RNA, 25 nt, Artificial Sequence
  Description of Artificial Sequence: Synthetic oligonucleotide
uuauauaauucccuuucuucauaua

SEQ ID NO: 3990 - RNA, 25 nt, Artificial Sequence
  Description of Artificial Sequence: Synthetic oligonucleotide
acugcauccaguacuagaaccauca

SEQ ID NO: 3991 - RNA, 25 nt, Artificial Sequence
  Description of Artificial Sequence: Synthetic oligonucleotide
auuauuauguaucauuuugaaagaa

SEQ ID NO: 3992 - RNA, 25 nt, Artificial Sequence
  Description of Artificial Sequence: Synthetic oligonucleotide
auaccugaugagaugaaggaugaga

SEQ ID NO: 3993 - RNA, 25 nt, Artificial Sequence
  Description of Artificial Sequence: Synthetic oligonucleotide
aacaaaugacagagaugagucucca

SEQ ID NO: 3994 - RNA, 25 nt, Artificial Sequence
  Description of Artificial Sequence: Synthetic oligonucleotide
aaguaaagggggccucacaucaaua

SEQ ID NO: 3995 - RNA, 25 nt, Artificial Sequence
  Description of Artificial Sequence: Synthetic oligonucleotide
aauuaggaaacuuagauauaagucg

SEQ ID NO: 3996 - RNA, 25 nt, Artificial Sequence
  Description of Artificial Sequence: Synthetic oligonucleotide
gcccuuuucugaaaauucuacccca

SEQ ID NO: 3997 - RNA, 25 nt, Artificial Sequence
  Description of Artificial Sequence: Synthetic oligonucleotide
aagucauuuagauuuuuaaaaaaua

SEQ ID NO: 3998 - RNA, 25 nt, Artificial Sequence
  Description of Artificial Sequence: Synthetic oligonucleotide
auuucuaauguuaaaauauugggac

SEQ ID NO: 3999 - RNA, 25 nt, Artificial Sequence
  Description of Artificial Sequence: Synthetic oligonucleotide
ccaaauuagaaucaauaguauaaga

SEQ ID NO: 4000 - RNA, 25 nt, Artificial Sequence
  Description of Artificial Sequence: Synthetic oligonucleotide
auuaauuaauuagaguaaaaauauc

SEQ ID NO: 4001 - RNA, 25 nt, Artificial Sequence
  Description of Artificial Sequence: Synthetic oligonucleotide
cuauuaaggcagagaaaguuuagag

SEQ ID NO: 4002 - RNA, 25 nt, Artificial Sequence
  Description of Artificial Sequence: Synthetic oligonucleotide
gaaaaaaauccaaagaaauuugugu

SEQ ID NO: 4003 - RNA, 25 nt, Artificial Sequence
  Description of Artificial Sequence: Synthetic oligonucleotide
uuucuuccuauucugaacaaguaaa

SEQ ID NO: 4004 - RNA, 25 nt, Artificial Sequence
  Description of Artificial Sequence: Synthetic oligonucleotide
auccauccauccauccauccaaacc

SEQ ID NO: 4005 - RNA, 25 nt, Artificial Sequence
  Description of Artificial Sequence: Synthetic oligonucleotide
cuccuuuaucuaacugugucuacua

SEQ ID NO: 4006 - RNA, 25 nt, Artificial Sequence
  Description of Artificial Sequence: Synthetic oligonucleotide
aaaagcaccauguuuuguggggaac

SEQ ID NO: 4007 - RNA, 25 nt, Artificial Sequence
  Description of Artificial Sequence: Synthetic oligonucleotide
cacucagauaaauggaauaucaucc

SEQ ID NO: 4008 - RNA, 25 nt, Artificial Sequence
  Description of Artificial Sequence: Synthetic oligonucleotide
cucaacuucaaaauucuaugaucua

SEQ ID NO: 4009 - RNA, 25 nt, Artificial Sequence
  Description of Artificial Sequence: Synthetic oligonucleotide
aggagauuuaauuaaaaugacauuu

SEQ ID NO: 4010 - RNA, 25 nt, Artificial Sequence
  Description of Artificial Sequence: Synthetic oligonucleotide
uuaauuuuucuaugcguuccaacaa

SEQ ID NO: 4011 - RNA, 25 nt, Artificial Sequence
  Description of Artificial Sequence: Synthetic oligonucleotide
aucagauugcauagucucuuuugug

SEQ ID NO: 4012 - RNA, 25 nt, Artificial Sequence
  Description of Artificial Sequence: Synthetic oligonucleotide
gaauagcugucauauaaucaguugu

SEQ ID NO: 4013 - RNA, 25 nt, Artificial Sequence
  Description of Artificial Sequence: Synthetic oligonucleotide
uacuguaagauaucuccuuuaaacu

SEQ ID NO: 4014 - RNA, 25 nt, Artificial Sequence
  Description of Artificial Sequence: Synthetic oligonucleotide
ucauuugggauauaaguuaaacauc

SEQ ID NO: 4015 - RNA, 25 nt, Artificial Sequence
  Description of Artificial Sequence: Synthetic oligonucleotide
ccuucaaauuguugauguugacaaa

SEQ ID NO: 4016 - RNA, 25 nt, Artificial Sequence
  Description of Artificial Sequence: Synthetic oligonucleotide
acaggauaauuucaauaauauuauu

SEQ ID NO: 4017 - RNA, 25 nt, Artificial Sequence
  Description of Artificial Sequence: Synthetic oligonucleotide
ucaaacauaaacuggucuaggagaa

SEQ ID NO: 4018 - RNA, 25 nt, Artificial Sequence
  Description of Artificial Sequence: Synthetic oligonucleotide
auauugcaucacugacuaauuagcc

SEQ ID NO: 4019 - RNA, 25 nt, Artificial Sequence
  Description of Artificial Sequence: Synthetic oligonucleotide
cuaucuagagucuaacuucaccauu

SEQ ID NO: 4020 - RNA, 25 nt, Artificial Sequence
  Description of Artificial Sequence: Synthetic oligonucleotide
uaaaccaaaagcagauggugguccu

SEQ ID NO: 4021 - RNA, 25 nt, Artificial Sequence
  Description of Artificial Sequence: Synthetic oligonucleotide
uuggccaagaauauuggagacauug

SEQ ID NO: 4022 - RNA, 25 nt, Artificial Sequence
  Description of Artificial Sequence: Synthetic oligonucleotide
ggaguugguuuuuuucuaagcuaua

SEQ ID NO: 4023 - RNA, 25 nt, Artificial Sequence
  Description of Artificial Sequence: Synthetic oligonucleotide
aagaagugaggcgagcugaaaaagu

SEQ ID NO: 4024 - RNA, 25 nt, Artificial Sequence
  Description of Artificial Sequence: Synthetic oligonucleotide
uaugguagagcaggagaaggguuug

SEQ ID NO: 4025 - RNA, 25 nt, Artificial Sequence
  Description of Artificial Sequence: Synthetic oligonucleotide
gugagauuccuucuagugaaguuca

SEQ ID NO: 4026 - RNA, 25 nt, Artificial Sequence
  Description of Artificial Sequence: Synthetic oligonucleotide
acccucaaacuuuucagggguaaag

SEQ ID NO: 4027 - RNA, 25 nt, Artificial Sequence
  Description of Artificial Sequence: Synthetic oligonucleotide
gacacagagugauucaggggccaca

SEQ ID NO: 4028 - RNA, 25 nt, Artificial Sequence
  Description of Artificial Sequence: Synthetic oligonucleotide
aaucuaauagcucagggcucuccua

SEQ ID NO: 4029 - RNA, 25 nt, Artificial Sequence
  Description of Artificial Sequence: Synthetic oligonucleotide
auccauucagagaagucucuaggaa

SEQ ID NO: 4030 - RNA, 25 nt, Artificial Sequence
  Description of Artificial Sequence: Synthetic oligonucleotide
aaagggaucucauaucaguacuuau

SEQ ID NO: 4031 - RNA, 25 nt, Artificial Sequence
  Description of Artificial Sequence: Synthetic oligonucleotide
ugaaaaauugaauauaagccucccu

SEQ ID NO: 4032 - RNA, 25 nt, Artificial Sequence
  Description of Artificial Sequence: Synthetic oligonucleotide
uuucuaaauaaaucugcaucgaguc

SEQ ID NO: 4033 - RNA, 25 nt, Artificial Sequence
  Description of Artificial Sequence: Synthetic oligonucleotide
caucacagcccucuuuuuggauacu

SEQ ID NO: 4034 - RNA, 25 nt, Artificial Sequence
  Description of Artificial Sequence: Synthetic oligonucleotide
uuuacaauaugcauaugguuucuac

SEQ ID NO: 4035 - RNA, 25 nt, Artificial Sequence
  Description of Artificial Sequence: Synthetic oligonucleotide
cugggcuauagaaagcagaaucacu

SEQ ID NO: 4036 - RNA, 25 nt, Artificial Sequence
  Description of Artificial Sequence: Synthetic oligonucleotide
ucauuuuggagaaggaaaaaaugaa

SEQ ID NO: 4037 - RNA, 25 nt, Artificial Sequence
  Description of Artificial Sequence: Synthetic oligonucleotide
auaguuaaaacaaacuuuuaacugu

SEQ ID NO: 4038 - RNA, 25 nt, Artificial Sequence
  Description of Artificial Sequence: Synthetic oligonucleotide
uuaagguaacagaaauguauuuagu

SEQ ID NO: 4039 - RNA, 25 nt, Artificial Sequence
  Description of Artificial Sequence: Synthetic oligonucleotide
ugaaugucucuuuccuccuaagaac

SEQ ID NO: 4040 - RNA, 25 nt, Artificial Sequence
  Description of Artificial Sequence: Synthetic oligonucleotide
cacaagacuucuacauguuggguaa

SEQ ID NO: 4041 - RNA, 25 nt, Artificial Sequence
  Description of Artificial Sequence: Synthetic oligonucleotide
auaccuagagaugcauguaggaaua

SEQ ID NO: 4042 - RNA, 25 nt, Artificial Sequence
  Description of Artificial Sequence: Synthetic oligonucleotide
aauccaaaaugacccaaaugcuuua

SEQ ID NO: 4043 - RNA, 25 nt, Artificial Sequence
  Description of Artificial Sequence: Synthetic oligonucleotide
auaauagcaccacuuuauaauucuu

SEQ ID NO: 4044 - RNA, 25 nt, Artificial Sequence
  Description of Artificial Sequence: Synthetic oligonucleotide
uuugaaugauuucuguaguauauaa

SEQ ID NO: 4045 - RNA, 25 nt, Artificial Sequence
  Description of Artificial Sequence: Synthetic oligonucleotide
auugacuucaguuguuugaguguuu

SEQ ID NO: 4046 - RNA, 25 nt, Artificial Sequence
  Description of Artificial Sequence: Synthetic oligonucleotide
uuuuguuuuauuuuuguccccccug

SEQ ID NO: 4047 - RNA, 25 nt, Artificial Sequence
  Description of Artificial Sequence: Synthetic oligonucleotide
gggaaaacauauuucagcauguaua

SEQ ID NO: 4048 - RNA, 25 nt, Artificial Sequence
  Description of Artificial Sequence: Synthetic oligonucleotide
aagagggagaaaaaaaguuucauuc

SEQ ID NO: 4049 - RNA, 25 nt, Artificial Sequence
  Description of Artificial Sequence: Synthetic oligonucleotide
ccuuccagagaauaacuuauuuagu

SEQ ID NO: 4050 - RNA, 25 nt, Artificial Sequence
  Description of Artificial Sequence: Synthetic oligonucleotide
uccaguaggguagaauuuuaaaaug

SEQ ID NO: 4051 - RNA, 25 nt, Artificial Sequence
  Description of Artificial Sequence: Synthetic oligonucleotide
gucaguuaaagucuucaaagugcuu

SEQ ID NO: 4052 - RNA, 25 nt, Artificial Sequence
  Description of Artificial Sequence: Synthetic oligonucleotide
uggggggauaucagauuccagaggc

SEQ ID NO: 4053 - RNA, 25 nt, Artificial Sequence
  Description of Artificial Sequence: Synthetic oligonucleotide
ccaauuguagcaauugaaauuugca

SEQ ID NO: 4054 - RNA, 25 nt, Artificial Sequence
  Description of Artificial Sequence: Synthetic oligonucleotide
agaaucaauuauguaaaucugagac

SEQ ID NO: 4055 - RNA, 25 nt, Artificial Sequence
  Description of Artificial Sequence: Synthetic oligonucleotide
caaauuaguauuaaaauuacacgga

SEQ ID NO: 4056 - RNA, 25 nt, Artificial Sequence
  Description of Artificial Sequence: Synthetic oligonucleotide
aguauauuuuuuaaaucacccaacu

SEQ ID NO: 4057 - RNA, 25 nt, Artificial Sequence
  Description of Artificial Sequence: Synthetic oligonucleotide
uuuguagauuauaccuauuuugggc

SEQ ID NO: 4058 - RNA, 25 nt, Artificial Sequence
  Description of Artificial Sequence: Synthetic oligonucleotide
cagguauggaaaaauuuugcaguua

SEQ ID NO: 4059 - RNA, 25 nt, Artificial Sequence
  Description of Artificial Sequence: Synthetic oligonucleotide
aaaugauugccuaaagaaaguggua

SEQ ID NO: 4060 - RNA, 25 nt, Artificial Sequence
  Description of Artificial Sequence: Synthetic oligonucleotide
aaacaggugaggaaagauggccucu

SEQ ID NO: 4061 - RNA, 25 nt, Artificial Sequence
  Description of Artificial Sequence: Synthetic oligonucleotide
ugaucuaggauagauccagaaccac

SEQ ID NO: 4062 - RNA, 25 nt, Artificial Sequence
  Description of Artificial Sequence: Synthetic oligonucleotide
caaagcaucugcaccacaaaaggug

SEQ ID NO: 4063 - RNA, 25 nt, Artificial Sequence
  Description of Artificial Sequence: Synthetic oligonucleotide
guuagacuaccaagcagcuccuggu

SEQ ID NO: 4064 - RNA, 25 nt, Artificial Sequence
  Description of Artificial Sequence: Synthetic oligonucleotide
uuuucugcauaguauuaguagcaca

SEQ ID NO: 4065 - RNA, 25 nt, Artificial Sequence
  Description of Artificial Sequence: Synthetic oligonucleotide
agcuuaggaugagaauccuuucucc

SEQ ID NO: 4066 - RNA, 25 nt, Artificial Sequence
  Description of Artificial Sequence: Synthetic oligonucleotide
caguaacauucuuaaaauagcauga

SEQ ID NO: 4067 - RNA, 25 nt, Artificial Sequence
  Description of Artificial Sequence: Synthetic oligonucleotide
aaaaacaacgcaaaacucaaauuuc

SEQ ID NO: 4068 - RNA, 25 nt, Artificial Sequence
  Description of Artificial Sequence: Synthetic oligonucleotide
cuauuaaaacacacaaacuaaaauc

SEQ ID NO: 4069 - RNA, 25 nt, Artificial Sequence
  Description of Artificial Sequence: Synthetic oligonucleotide
caagugauucuuuuuuguagauuag

SEQ ID NO: 4070 - RNA, 25 nt, Artificial Sequence
  Description of Artificial Sequence: Synthetic oligonucleotide
gggagaaggacugaauaucuaauuu

SEQ ID NO: 4071 - RNA, 25 nt, Artificial Sequence
  Description of Artificial Sequence: Synthetic oligonucleotide
uaagagaaggaauaguguuuaagug

SEQ ID NO: 4072 - RNA, 25 nt, Artificial Sequence
  Description of Artificial Sequence: Synthetic oligonucleotide
guuauagugugugagcuaauaccuu

SEQ ID NO: 4073 - RNA, 25 nt, Artificial Sequence
  Description of Artificial Sequence: Synthetic oligonucleotide
ucuaaaggaaagacauggcaugaag

SEQ ID NO: 4074 - RNA, 25 nt, Artificial Sequence
  Description of Artificial Sequence: Synthetic oligonucleotide
gauugugcauacuuacaaugcuaag

SEQ ID NO: 4075 - RNA, 25 nt, Artificial Sequence
  Description of Artificial Sequence: Synthetic oligonucleotide
ggaaaaaucaagaaaaggacugugu

SEQ ID NO: 4076 - RNA, 25 nt, Artificial Sequence
  Description of Artificial Sequence: Synthetic oligonucleotide
ugaggcucugcuacuagaugaaguu

SEQ ID NO: 4077 - RNA, 25 nt, Artificial Sequence
  Description of Artificial Sequence: Synthetic oligonucleotide
uggaaggacuauuaaugugcuucuu

SEQ ID NO: 4078 - RNA, 25 nt, Artificial Sequence
  Description of Artificial Sequence: Synthetic oligonucleotide
ugaaguaucaaaaaugaaaagaaaa

SEQ ID NO: 4079 - RNA, 25 nt, Artificial Sequence
  Description of Artificial Sequence: Synthetic oligonucleotide
auuaaaauuguuuaagccugacagg

SEQ ID NO: 4080 - RNA, 25 nt, Artificial Sequence
  Description of Artificial Sequence: Synthetic oligonucleotide
ggaaggauguaaauacaaguuuuuc

SEQ ID NO: 4081 - RNA, 25 nt, Artificial Sequence
  Description of Artificial Sequence: Synthetic oligonucleotide
cuagagcucucuaaccuuuauuuca

SEQ ID NO: 4082 - RNA, 25 nt, Artificial Sequence
  Description of Artificial Sequence: Synthetic oligonucleotide
aaaacuggaauuauucauccaucug

SEQ ID NO: 4083 - RNA, 25 nt, Artificial Sequence
  Description of Artificial Sequence: Synthetic oligonucleotide
guaauuguugauaauuuaacuagua

SEQ ID NO: 4084 - RNA, 25 nt, Artificial Sequence
  Description of Artificial Sequence: Synthetic oligonucleotide
auauguaguucauaagguaauagaa

SEQ ID NO: 4085 - RNA, 25 nt, Artificial Sequence
  Description of Artificial Sequence: Synthetic oligonucleotide
aaaggugaucaugaaagcauguaua

SEQ ID NO: 4086 - RNA, 25 nt, Artificial Sequence
  Description of Artificial Sequence: Synthetic oligonucleotide
auaacuggacagaaccacgauaaug

SEQ ID NO: 4087 - RNA, 25 nt, Artificial Sequence
  Description of Artificial Sequence: Synthetic oligonucleotide
gcuauaagauguagauuuaguuagg

SEQ ID NO: 4088 - RNA, 25 nt, Artificial Sequence
  Description of Artificial Sequence: Synthetic oligonucleotide
guuaucagauguuaaaugauuuuaa

SEQ ID NO: 4089 - RNA, 25 nt, Artificial Sequence
  Description of Artificial Sequence: Synthetic oligonucleotide
auauuauuaaauaaaucaaacuaga

SEQ ID NO: 4090 - RNA, 25 nt, Artificial Sequence
  Description of Artificial Sequence: Synthetic oligonucleotide
aaaacuaaccacaaguauaauguaa

SEQ ID NO: 4091 - RNA, 25 nt, Artificial Sequence
  Description of Artificial Sequence: Synthetic oligonucleotide
acaaaguuaaaugcaggauauaaaa

SEQ ID NO: 4092 - RNA, 25 nt, Artificial Sequence
  Description of Artificial Sequence: Synthetic oligonucleotide
aauguaggauggauuuugcauagua

SEQ ID NO: 4093 - RNA, 25 nt, Artificial Sequence
  Description of Artificial Sequence: Synthetic oligonucleotide
aaaaagauaaguuugccauuuaaaa

SEQ ID NO: 4094 - RNA, 25 nt, Artificial Sequence
  Description of Artificial Sequence: Synthetic oligonucleotide
auuguuguuuguuggguuuagcuga

SEQ ID NO: 4095 - RNA, 25 nt, Artificial Sequence
  Description of Artificial Sequence: Synthetic oligonucleotide
aaaguaggcauauaugguuccacuu

SEQ ID NO: 4096 - RNA, 25 nt, Artificial Sequence
  Description of Artificial Sequence: Synthetic oligonucleotide
ugggaaaacuugcuuuaaagcauua

SEQ ID NO: 4097 - RNA, 25 nt, Artificial Sequence
  Description of Artificial Sequence: Synthetic oligonucleotide
acaaugaacaauuuuuucucauucu

SEQ ID NO: 4098 - RNA, 25 nt, Artificial Sequence
  Description of Artificial Sequence: Synthetic oligonucleotide
ucuuauuccuuuaucacuuuuuaaa

SEQ ID NO: 4099 - RNA, 25 nt, Artificial Sequence
  Description of Artificial Sequence: Synthetic oligonucleotide
auguaaagaaaauuguauuuauuua

SEQ ID NO: 4100 - RNA, 25 nt, Artificial Sequence
  Description of Artificial Sequence: Synthetic oligonucleotide
auuuuuuuaaauaaacaccaccuug

SEQ ID NO: 4101 - RNA, 25 nt, Artificial Sequence
  Description of Artificial Sequence: Synthetic oligonucleotide
gcagaauuuaauaggcaaacauguu

SEQ ID NO: 4102 - RNA, 25 nt, Artificial Sequence
  Description of Artificial Sequence: Synthetic oligonucleotide
uacauaugacuaaguaagggucuuc

SEQ ID NO: 4103 - RNA, 25 nt, Artificial Sequence
  Description of Artificial Sequence: Synthetic oligonucleotide
caagaugaaguaaagaaaauguaaa

SEQ ID NO: 4104 - RNA, 25 nt, Artificial Sequence
  Description of Artificial Sequence: Synthetic oligonucleotide
auguucuauuaccuuaugcagagac

SEQ ID NO: 4105 - RNA, 25 nt, Artificial Sequence
  Description of Artificial Sequence: Synthetic oligonucleotide
uuuagcuagcaaacaaacaaaauac

SEQ ID NO: 4106 - RNA, 25 nt, Artificial Sequence
  Description of Artificial Sequence: Synthetic oligonucleotide
caguuaauuggugauauguccuuuc

SEQ ID NO: 4107 - RNA, 25 nt, Artificial Sequence
  Description of Artificial Sequence: Synthetic oligonucleotide
cuuuucucacuaugcccucuugccu

SEQ ID NO: 4108 - RNA, 25 nt, Artificial Sequence
  Description of Artificial Sequence: Synthetic oligonucleotide
uccaaaaaugacaacaaagaaucac

SEQ ID NO: 4109 - RNA, 25 nt, Artificial Sequence
  Description of Artificial Sequence: Synthetic oligonucleotide
caauuuuucugauaaauaaaugcua

SEQ ID NO: 4110 - RNA, 25 nt, Artificial Sequence
  Description of Artificial Sequence: Synthetic oligonucleotide
aaaccaagcguuucaaacuauugca

SEQ ID NO: 4111 - RNA, 25 nt, Artificial Sequence
  Description of Artificial Sequence: Synthetic oligonucleotide
auugccauucuuuuggacuuuaguu

SEQ ID NO: 4112 - RNA, 25 nt, Artificial Sequence
  Description of Artificial Sequence: Synthetic oligonucleotide
uauuagaaugaugauuguuauaggg

SEQ ID NO: 4113 - RNA, 25 nt, Artificial Sequence
  Description of Artificial Sequence: Synthetic oligonucleotide
gcaaaugagaaauccaugugcauca

SEQ ID NO: 4114 - RNA, 25 nt, Artificial Sequence
  Description of Artificial Sequence: Synthetic oligonucleotide
agcuucuaguuguuaaaaaaaccag

SEQ ID NO: 4115 - RNA, 25 nt, Artificial Sequence
  Description of Artificial Sequence: Synthetic oligonucleotide
gauaaauuaacuucuacuguauacu

SEQ ID NO: 4116 - RNA, 25 nt, Artificial Sequence
  Description of Artificial Sequence: Synthetic oligonucleotide
ugugggcagaggauccuagagcuga

SEQ ID NO: 4117 - RNA, 25 nt, Artificial Sequence
  Description of Artificial Sequence: Synthetic oligonucleotide
auccuacaacaucagcuucuaguug

SEQ ID NO: 4118 - RNA, 25 nt, Artificial Sequence
  Description of Artificial Sequence: Synthetic oligonucleotide
uaaauuaacuucuacuguauauacu

SEQ ID NO: 4119 - RNA, 25 nt, Artificial Sequence
  Description of Artificial Sequence: Synthetic oligonucleotide
ugugggcagaggaucuuacugugcc

SEQ ID NO: 4120 - RNA, 25 nt, Artificial Sequence
  Description of Artificial Sequence: Synthetic oligonucleotide
cucuguuuguguacauggacuucgg

SEQ ID NO: 4121 - RNA, 25 nt, Artificial Sequence
  Description of Artificial Sequence: Synthetic oligonucleotide
guguguaucaguuugaaggacagcc

SEQ ID NO: 4122 - RNA, 25 nt, Artificial Sequence
  Description of Artificial Sequence: Synthetic oligonucleotide
cuugccccauguaaacauauaaaug

SEQ ID NO: 4123 - RNA, 25 nt, Artificial Sequence
  Description of Artificial Sequence: Synthetic oligonucleotide
gcagauugguaucgccugguugcua

SEQ ID NO: 4124 - RNA, 25 nt, Artificial Sequence
  Description of Artificial Sequence: Synthetic oligonucleotide
auuugcuuaagaacaaauauuauac

SEQ ID NO: 4125 - RNA, 25 nt, Artificial Sequence
  Description of Artificial Sequence: Synthetic oligonucleotide
cagaugagaucaggcauaauuuuaa

SEQ ID NO: 4126 - RNA, 25 nt, Artificial Sequence
  Description of Artificial Sequence: Synthetic oligonucleotide
aaagaucauuaucaguggagaccuc

SEQ ID NO: 4127 - RNA, 25 nt, Artificial Sequence
  Description of Artificial Sequence: Synthetic oligonucleotide
cauuauuacugauauuacaaugggg

SEQ ID NO: 4128 - RNA, 25 nt, Artificial Sequence
  Description of Artificial Sequence: Synthetic oligonucleotide
gccaguuuuuauacuucuggguaga

SEQ ID NO: 4129 - RNA, 25 nt, Artificial Sequence
  Description of Artificial Sequence: Synthetic oligonucleotide
aauuaauaaaauuuuucugauccca

SEQ ID NO: 4130 - RNA, 25 nt, Artificial Sequence
  Description of Artificial Sequence: Synthetic oligonucleotide
agagaucugaguucucucugcaguu

SEQ ID NO: 4131 - RNA, 25 nt, Artificial Sequence
  Description of Artificial Sequence: Synthetic oligonucleotide
uggaaacaagaagcuguugugggca

SEQ ID NO: 4132 - RNA, 25 nt, Artificial Sequence
  Description of Artificial Sequence: Synthetic oligonucleotide
auugugucgggccaggggcccuugu

SEQ ID NO: 4133 - RNA, 25 nt, Artificial Sequence
  Description of Artificial Sequence: Synthetic oligonucleotide
uguuugugugggcaaauaucuuuua

SEQ ID NO: 4134 - RNA, 25 nt, Artificial Sequence
  Description of Artificial Sequence: Synthetic oligonucleotide
agcagugugagcugcuuuuuucuuu

SEQ ID NO: 4135 - RNA, 25 nt, Artificial Sequence
  Description of Artificial Sequence: Synthetic oligonucleotide
uucauuaaaagucucucuaaaauaa

SEQ ID NO: 4136 - RNA, 25 nt, Artificial Sequence
  Description of Artificial Sequence: Synthetic oligonucleotide
auagaaauuucagauacucgguuca

SEQ ID NO: 4137 - RNA, 25 nt, Artificial Sequence
  Description of Artificial Sequence: Synthetic oligonucleotide
aagucucacugauuuuguagagguc

SEQ ID NO: 4138 - RNA, 25 nt, Artificial Sequence
  Description of Artificial Sequence: Synthetic oligonucleotide
ccaaaaauguaggaucugucacuuu

SEQ ID NO: 4139 - RNA, 25 nt, Artificial Sequence
  Description of Artificial Sequence: Synthetic oligonucleotide
uugcaggccccugccucaccuaauu

SEQ ID NO: 4140 - RNA, 25 nt, Artificial Sequence
  Description of Artificial Sequence: Synthetic oligonucleotide
uccuggccaggugacauuuugggca

SEQ ID NO: 4141 - RNA, 25 nt, Artificial Sequence
  Description of Artificial Sequence: Synthetic oligonucleotide
agaaguaaaugcuucuauagucaca

SEQ ID NO: 4142 - RNA, 25 nt, Artificial Sequence
  Description of Artificial Sequence: Synthetic oligonucleotide
aagcuaaaaugacucuaagccccaa

SEQ ID NO: 4143 - RNA, 25 nt, Artificial Sequence
  Description of Artificial Sequence: Synthetic oligonucleotide
auuucacgggggguauucacaugcu

SEQ ID NO: 4144 - RNA, 25 nt, Artificial Sequence
  Description of Artificial Sequence: Synthetic oligonucleotide
uuccucuggaaaauacucuuugaca

SEQ ID NO: 4145 - RNA, 25 nt, Artificial Sequence
  Description of Artificial Sequence: Synthetic oligonucleotide
agucagcuuugcaaguaagugauua

SEQ ID NO: 4146 - RNA, 25 nt, Artificial Sequence
  Description of Artificial Sequence: Synthetic oligonucleotide
accuuguuaggaaucaaagaaaaau

SEQ ID NO: 4147 - RNA, 25 nt, Artificial Sequence
  Description of Artificial Sequence: Synthetic oligonucleotide
uguauuucucucugaccuuuagagg

SEQ ID NO: 4148 - RNA, 25 nt, Artificial Sequence
  Description of Artificial Sequence: Synthetic oligonucleotide
gaaaauagaauccuucccuuuuuug

SEQ ID NO: 4149 - RNA, 25 nt, Artificial Sequence
  Description of Artificial Sequence: Synthetic oligonucleotide
gcccauugacacaacuggcacugcu

SEQ ID NO: 4150 - RNA, 25 nt, Artificial Sequence
  Description of Artificial Sequence: Synthetic oligonucleotide
ucucuucccuuucuaccacccuggu

SEQ ID NO: 4151 - RNA, 25 nt, Artificial Sequence
  Description of Artificial Sequence: Synthetic oligonucleotide
uucaaaguagucccccgaugcuguc

SEQ ID NO: 4152 - RNA, 25 nt, Artificial Sequence
  Description of Artificial Sequence: Synthetic oligonucleotide
ccuguuccuuucuuaagccauagug

SEQ ID NO: 4153 - RNA, 25 nt, Artificial Sequence
  Description of Artificial Sequence: Synthetic oligonucleotide
ggaucucugagauccuacaccccac

SEQ ID NO: 4154 - RNA, 25 nt, Artificial Sequence
  Description of Artificial Sequence: Synthetic oligonucleotide
cuuugugaaacacugacuucaucuu

SEQ ID NO: 4155 - RNA, 25 nt, Artificial Sequence
  Description of Artificial Sequence: Synthetic oligonucleotide
uugcccucgaaugccugauuuuuuc

SEQ ID NO: 4156 - RNA, 25 nt, Artificial Sequence
  Description of Artificial Sequence: Synthetic oligonucleotide
cauaagagauucuagcaauuuggac

SEQ ID NO: 4157 - RNA, 25 nt, Artificial Sequence
  Description of Artificial Sequence: Synthetic oligonucleotide
cacuguuuaagugaacuaucaaacu

SEQ ID NO: 4158 - RNA, 25 nt, Artificial Sequence
  Description of Artificial Sequence: Synthetic oligonucleotide
uaccgcauagagaauauuuaagcua

SEQ ID NO: 4159 - RNA, 25 nt, Artificial Sequence
  Description of Artificial Sequence: Synthetic oligonucleotide
auuaaaauuaugguuucccaugaag

SEQ ID NO: 4160 - RNA, 25 nt, Artificial Sequence
  Description of Artificial Sequence: Synthetic oligonucleotide
gaucaauucucuguguccuucccua

SEQ ID NO: 4161 - RNA, 25 nt, Artificial Sequence
  Description of Artificial Sequence: Synthetic oligonucleotide
auaggaauuugagacgaguuagccc

SEQ ID NO: 4162 - RNA, 25 nt, Artificial Sequence
  Description of Artificial Sequence: Synthetic oligonucleotide
cugugaugaaucuugaaacucacau

SEQ ID NO: 4163 - RNA, 25 nt, Artificial Sequence
  Description of Artificial Sequence: Synthetic oligonucleotide
uauguccacauacacuugguagaac

SEQ ID NO: 4164 - RNA, 25 nt, Artificial Sequence
  Description of Artificial Sequence: Synthetic oligonucleotide
cuucgauuuaaucuuuacauaaaag

SEQ ID NO: 4165 - RNA, 25 nt, Artificial Sequence
  Description of Artificial Sequence: Synthetic oligonucleotide
gcuguacauauaaccaagaaguuau

SEQ ID NO: 4166 - RNA, 25 nt, Artificial Sequence
  Description of Artificial Sequence: Synthetic oligonucleotide
uuuuugccaguaaauuaacuuauuu

SEQ ID NO: 4167 - RNA, 25 nt, Artificial Sequence
  Description of Artificial Sequence: Synthetic oligonucleotide
ugcuuuauucaucuuauuugguucc

SEQ ID NO: 4168 - RNA, 25 nt, Artificial Sequence
  Description of Artificial Sequence: Synthetic oligonucleotide
cuaaucguaaauauuuuguagcugc

SEQ ID NO: 4169 - RNA, 25 nt, Artificial Sequence
  Description of Artificial Sequence: Synthetic oligonucleotide
cuguaaauuuuuuucucccaaauga

SEQ ID NO: 4170 - RNA, 25 nt, Artificial Sequence
  Description of Artificial Sequence: Synthetic oligonucleotide
aggagucuuauuaucauaaagguaa

SEQ ID NO: 4171 - RNA, 25 nt, Artificial Sequence
  Description of Artificial Sequence: Synthetic oligonucleotide
aaggcuauucagcuuugauaaccac

SEQ ID NO: 4172 - RNA, 25 nt, Artificial Sequence
  Description of Artificial Sequence: Synthetic oligonucleotide
ccugcaauucuuuuuuggaucauuc

SEQ ID NO: 4173 - RNA, 25 nt, Artificial Sequence
  Description of Artificial Sequence: Synthetic oligonucleotide
cauccaucuaacaaauacauaauga

SEQ ID NO: 4174 - RNA, 25 nt, Artificial Sequence
  Description of Artificial Sequence: Synthetic oligonucleotide
aggacaguucauguuaaugaaaauc

SEQ ID NO: 4175 - RNA, 25 nt, Artificial Sequence
  Description of Artificial Sequence: Synthetic oligonucleotide
ccauguuguuuaauagaaugccauc

SEQ ID NO: 4176 - RNA, 25 nt, Artificial Sequence
  Description of Artificial Sequence: Synthetic oligonucleotide
ccuuuaccuacuuuugcucuuuaug

SEQ ID NO: 4177 - RNA, 25 nt, Artificial Sequence
  Description of Artificial Sequence: Synthetic oligonucleotide
ggacguuuuucuuuucaugcucuag

SEQ ID NO: 4178 - RNA, 25 nt, Artificial Sequence
  Description of Artificial Sequence: Synthetic oligonucleotide
gugagcuuucccuauaucaugagaa

SEQ ID NO: 4179 - RNA, 25 nt, Artificial Sequence
  Description of Artificial Sequence: Synthetic oligonucleotide
agugguuauauuugugcaaauauac

SEQ ID NO: 4180 - RNA, 25 nt, Artificial Sequence
  Description of Artificial Sequence: Synthetic oligonucleotide
caaauauaggaaaacaaagauucau

SEQ ID NO: 4181 - RNA, 25 nt, Artificial Sequence
  Description of Artificial Sequence: Synthetic oligonucleotide
uaccuguaggcaauagucuaacuug

SEQ ID NO: 4182 - RNA, 25 nt, Artificial Sequence
  Description of Artificial Sequence: Synthetic oligonucleotide
guccaaaccacuuugccuuuacugc

SEQ ID NO: 4183 - RNA, 25 nt, Artificial Sequence
  Description of Artificial Sequence: Synthetic oligonucleotide
cuauuuuuauccccaaugcguagau

SEQ ID NO: 4184 - RNA, 25 nt, Artificial Sequence
  Description of Artificial Sequence: Synthetic oligonucleotide
uauuucccccaggccuauagccuuu

SEQ ID NO: 4185 - RNA, 25 nt, Artificial Sequence
  Description of Artificial Sequence: Synthetic oligonucleotide
ugugaaggaaagcaaaucauaccuc

SEQ ID NO: 4186 - RNA, 25 nt, Artificial Sequence
  Description of Artificial Sequence: Synthetic oligonucleotide
ccuguauauugacacgaaucugguu

SEQ ID NO: 4187 - RNA, 25 nt, Artificial Sequence
  Description of Artificial Sequence: Synthetic oligonucleotide
uuucaaaugucauuuccagauuuuu

SEQ ID NO: 4188 - RNA, 25 nt, Artificial Sequence
  Description of Artificial Sequence: Synthetic oligonucleotide
uuaguuaauuggggguuguccuuuu

SEQ ID NO: 4189 - RNA, 25 nt, Artificial Sequence
  Description of Artificial Sequence: Synthetic oligonucleotide
ucccuuaaugugagagucauuuucc

SEQ ID NO: 4190 - RNA, 25 nt, Artificial Sequence
  Description of Artificial Sequence: Synthetic oligonucleotide
cuguauauuucuggaucucucaggg

SEQ ID NO: 4191 - RNA, 25 nt, Artificial Sequence
  Description of Artificial Sequence: Synthetic oligonucleotide
ggcugggaggggggagugaggggac

SEQ ID NO: 4192 - RNA, 25 nt, Artificial Sequence
  Description of Artificial Sequence: Synthetic oligonucleotide
cuacaaccauagcacuccaagaacc

SEQ ID NO: 4193 - RNA, 25 nt, Artificial Sequence
  Description of Artificial Sequence: Synthetic oligonucleotide
ccuuuugggauuacuccaguaauca

SEQ ID NO: 4194 - RNA, 25 nt, Artificial Sequence
  Description of Artificial Sequence: Synthetic oligonucleotide
aacuacgaaaguuauuuucuaaaug

SEQ ID NO: 4195 - RNA, 25 nt, Artificial Sequence
  Description of Artificial Sequence: Synthetic oligonucleotide
guagauauguaagguguucuuuuaa

SEQ ID NO: 4196 - RNA, 25 nt, Artificial Sequence
  Description of Artificial Sequence: Synthetic oligonucleotide
aaguaagguacuuugaaauauguag

SEQ ID NO: 4197 - RNA, 25 nt, Artificial Sequence
  Description of Artificial Sequence: Synthetic oligonucleotide
gcauaaacugguacugcuguuaaau

SEQ ID NO: 4198 - RNA, 25 nt, Artificial Sequence
  Description of Artificial Sequence: Synthetic oligonucleotide
ugggucgauuauuaaacggagcagc

SEQ ID NO: 4199 - RNA, 25 nt, Artificial Sequence
  Description of Artificial Sequence: Synthetic oligonucleotide
cugugugagggcagcuaacuuugaa

SEQ ID NO: 4200 - RNA, 25 nt, Artificial Sequence
  Description of Artificial Sequence: Synthetic oligonucleotide
augccugucucccuggcuggugugu

SEQ ID NO: 4201 - RNA, 25 nt, Artificial Sequence
  Description of Artificial Sequence: Synthetic oligonucleotide
ucuccuucucauguugagagcacca

SEQ ID NO: 4202 - RNA, 25 nt, Artificial Sequence
  Description of Artificial Sequence: Synthetic oligonucleotide
agggauugcguggcugcaugcugaa

SEQ ID NO: 4203 - RNA, 25 nt, Artificial Sequence
  Description of Artificial Sequence: Synthetic oligonucleotide
aaccgcauuuucccaugguguauga

SEQ ID NO: 4204 - RNA, 25 nt, Artificial Sequence
  Description of Artificial Sequence: Synthetic oligonucleotide
acuaguucaucucuuucuugagcac

SEQ ID NO: 4205 - RNA, 25 nt, Artificial Sequence
  Description of Artificial Sequence: Synthetic oligonucleotide
ccauuacaagaagaucaaaugaaaa

SEQ ID NO: 4206 - RNA, 25 nt, Artificial Sequence
  Description of Artificial Sequence: Synthetic oligonucleotide
augagaucaauguggaagacaauuc

SEQ ID NO: 4207 - RNA, 25 nt, Artificial Sequence
  Description of Artificial Sequence: Synthetic oligonucleotide
cauagcacaaaaaaagucaucuuaa

SEQ ID NO: 4208 - RNA, 25 nt, Artificial Sequence
  Description of Artificial Sequence: Synthetic oligonucleotide
aaucuacucucaaacauucaucuua

SEQ ID NO: 4209 - RNA, 25 nt, Artificial Sequence
  Description of Artificial Sequence: Synthetic oligonucleotide
auacaugcaucaaaguaauuuacug

SEQ ID NO: 4210 - RNA, 25 nt, Artificial Sequence
  Description of Artificial Sequence: Synthetic oligonucleotide
gacaucaguuugggugagagaggga

SEQ ID NO: 4211 - RNA, 25 nt, Artificial Sequence
  Description of Artificial Sequence: Synthetic oligonucleotide
agucacuuuacugaaaaggcagagg

SEQ ID NO: 4212 - RNA, 25 nt, Artificial Sequence
  Description of Artificial Sequence: Synthetic oligonucleotide
gcuuaagguguauacauuuguacuc

SEQ ID NO: 4213 - RNA, 25 nt, Artificial Sequence
  Description of Artificial Sequence: Synthetic oligonucleotide
cacuuccuuauuuucuuaacuugua

SEQ ID NO: 4214 - RNA, 25 nt, Artificial Sequence
  Description of Artificial Sequence: Synthetic oligonucleotide
aagcagaaaacaagcccucucucuu

SEQ ID NO: 4215 - RNA, 25 nt, Artificial Sequence
  Description of Artificial Sequence: Synthetic oligonucleotide
ugugaaguaucuucaaaggauuggg

SEQ ID NO: 4216 - RNA, 25 nt, Artificial Sequence
  Description of Artificial Sequence: Synthetic oligonucleotide
ggugcaaaaauaccuugcugguaag

SEQ ID NO: 4217 - RNA, 25 nt, Artificial Sequence
  Description of Artificial Sequence: Synthetic oligonucleotide
gccaucaauguuuuauuuaaauccc

SEQ ID NO: 4218 - RNA, 25 nt, Artificial Sequence
  Description of Artificial Sequence: Synthetic oligonucleotide
cugcauucaaaguuagcugccuuuu

SEQ ID NO: 4219 - RNA, 25 nt, Artificial Sequence
  Description of Artificial Sequence: Synthetic oligonucleotide
uugaaauaaacaaacaaaaaauacu

SEQ ID NO: 4220 - RNA, 25 nt, Artificial Sequence
  Description of Artificial Sequence: Synthetic oligonucleotide
uacuguauguuugaaaaugugaaua

SEQ ID NO: 4221 - RNA, 25 nt, Artificial Sequence
  Description of Artificial Sequence: Synthetic oligonucleotide
aguauuuuuauagcuuguuaaagac

SEQ ID NO: 4222 - RNA, 25 nt, Artificial Sequence
  Description of Artificial Sequence: Synthetic oligonucleotide
cauggcuaguugcauuuguaaauaa

SEQ ID NO: 4223 - RNA, 25 nt, Artificial Sequence
  Description of Artificial Sequence: Synthetic oligonucleotide
aguauaauguugcuuugauuuucuu

SEQ ID NO: 4224 - RNA, 25 nt, Artificial Sequence
  Description of Artificial Sequence: Synthetic oligonucleotide
uuuguggacaucuuuauuuggaaca

SEQ ID NO: 4225 - RNA, 25 nt, Artificial Sequence
  Description of Artificial Sequence: Synthetic oligonucleotide
auaauugucuuuaggguugauuugu

SEQ ID NO: 4226 - RNA, 25 nt, Artificial Sequence
  Description of Artificial Sequence: Synthetic oligonucleotide
uauauaaguaauuggccugugauug

SEQ ID NO: 4227 - RNA, 25 nt, Artificial Sequence
  Description of Artificial Sequence: Synthetic oligonucleotide
guuucuuuuuugguuggaaguuauc

SEQ ID NO: 4228 - RNA, 25 nt, Artificial Sequence
  Description of Artificial Sequence: Synthetic oligonucleotide
cauuuugacauuacuugugauucug

SEQ ID NO: 4229 - RNA, 25 nt, Artificial Sequence
  Description of Artificial Sequence: Synthetic oligonucleotide
guguucagcacuauugugauguguu

SEQ ID NO: 4230 - RNA, 25 nt, Artificial Sequence
  Description of Artificial Sequence: Synthetic oligonucleotide
ucaaccucugcacucgcuuacacaa

SEQ ID NO: 4231 - RNA, 25 nt, Artificial Sequence
  Description of Artificial Sequence: Synthetic oligonucleotide
auaggauaugccaauuguguguggu

SEQ ID NO: 4232 - RNA, 25 nt, Artificial Sequence
  Description of Artificial Sequence: Synthetic oligonucleotide
uguaauguuauuuugauuuuuuucc

SEQ ID NO: 4233 - RNA, 25 nt, Artificial Sequence
  Description of Artificial Sequence: Synthetic oligonucleotide
cauguuauugaugaaggaucaugca

SEQ ID NO: 4234 - RNA, 25 nt, Artificial Sequence
  Description of Artificial Sequence: Synthetic oligonucleotide
accuaacacauacuaacuuuuuuaa

SEQ ID NO: 4235 - RNA, 25 nt, Artificial Sequence
  Description of Artificial Sequence: Synthetic oligonucleotide
auguuaggcauauuuuuaguauacu

SEQ ID NO: 4236 - RNA, 25 nt, Artificial Sequence
  Description of Artificial Sequence: Synthetic oligonucleotide
uuucucuuauucuuucuucuccucc

SEQ ID NO: 4237 - RNA, 25 nt, Artificial Sequence
  Description of Artificial Sequence: Synthetic oligonucleotide
caaccuuuuacccauccuccuuccu

SEQ ID NO: 4238 - RNA, 25 nt, Artificial Sequence
  Description of Artificial Sequence: Synthetic oligonucleotide
uuucccucauuccuguuguuauuug

SEQ ID NO: 4239 - RNA, 25 nt, Artificial Sequence
  Description of Artificial Sequence: Synthetic oligonucleotide
gagaaugagggagaaacaguauuuu

SEQ ID NO: 4240 - RNA, 25 nt, Artificial Sequence
  Description of Artificial Sequence: Synthetic oligonucleotide
uacauuuauguaauuaggcuuuucc

SEQ ID NO: 4241 - RNA, 25 nt, Artificial Sequence
  Description of Artificial Sequence: Synthetic oligonucleotide
cguuaguucucaaggauccucuuuu

SEQ ID NO: 4242 - RNA, 25 nt, Artificial Sequence
  Description of Artificial Sequence: Synthetic oligonucleotide
uggcucuugggaaagaauuguaccu

SEQ ID NO: 4243 - RNA, 25 nt, Artificial Sequence
  Description of Artificial Sequence: Synthetic oligonucleotide
uguacaaggcaauuauagaaugcga

SEQ ID NO: 4244 - RNA, 25 nt, Artificial Sequence
  Description of Artificial Sequence: Synthetic oligonucleotide
aacugcuuugccucauuccauacug

SEQ ID NO: 4245 - RNA, 25 nt, Artificial Sequence
  Description of Artificial Sequence: Synthetic oligonucleotide
gaucaucccagcugaacaauuugaa

SEQ ID NO: 4246 - RNA, 25 nt, Artificial Sequence
  Description of Artificial Sequence: Synthetic oligonucleotide
aaacuguucugccuuuuuguuacau

SEQ ID NO: 4247 - RNA, 25 nt, Artificial Sequence
  Description of Artificial Sequence: Synthetic oligonucleotide
ugaaucugucagaaauauauuuuua

SEQ ID NO: 4248 - RNA, 25 nt, Artificial Sequence
  Description of Artificial Sequence: Synthetic oligonucleotide
aauuuaauauaaaugaaauucaaua

SEQ ID NO: 4249 - RNA, 25 nt, Artificial Sequence
  Description of Artificial Sequence: Synthetic oligonucleotide
aaaauaugaaacaaacguuaaaaaa
